(19) United States
(12) Patent Application Publication
(10) Pub. No.: US 2004/0235071 A1
(43) Pub. Date: Nov. 25, 2004

(54) Methods and compositions for treating cancer using 15986, 2188, 20743, 9148, 9151, 9791, 44252, 14184, 42461, 8204, 7970, 25552, 21657, 26492, 2411, 15088, 1905, 28899, 63380, 33935, 10480, 12686, 25501, 17694, 15701, 53062, 49908, 21612, 38949, 6216, 46863, 9235, 2201, 6985, 9883, 12238, 18057, 21617, 39228, 49928, 54476, 62113, 64316, 12264, 32362, 58198, 2887, 3205, 8557, 9600, 9693, 44867, 53058, 55556, 57658, 2208, 10252, 10302, 14218, 33877, 10317, 10485, 25964, 14815, 1363, 1397, 14827, 21708, 3801, 64698, 2179 or 13249

(75) Inventors: Eric S. Lightcap, Natick, MA (US); Jeffrey A. Ecsedy, Jamaica Plain, MA (US); John J. Hunter, Oakland, CA (US); Kyle J. MacBeth, Boston, MA (US); Michelle Tighe Nestor, North Woodstock, NH (US)

Correspondence Address: Jean M. Silveri, Millennium Pharmaceuticals, Inc., 40 Landsdowne Street, Cambridge, MA, 02139, US

(73) Assignee: Millennium Pharmaceuticals, Inc.

(21) Appl. No.: 10/737,450

(22) Filed: Dec. 16, 2003

Related U.S. Application Data
(60) Provisional application No. 60/435,108, filed on Dec. 20, 2002.
(60) Provisional application No. 60/436,443, filed on Dec. 23, 2002.
(60) Provisional application No. 60/438,498, filed on Jan. 7, 2003.
(60) Provisional application No. 60/444,370, filed on Jan. 31, 2003.
(60) Provisional application No. 60/446,031, filed on Feb. 6, 2003.
(60) Provisional application No. 60/453,635, filed on Mar. 11, 2003.
(60) Provisional application No. 60/457,199, filed on Mar. 25, 2003.
(60) Provisional application No. 60/462,458, filed on Apr. 10, 2003.
(60) Provisional application No. 60/466,732, filed on Apr. 30, 2003.
(60) Provisional application No. 60/469,184, filed on May 8, 2003.
(60) Provisional application No. 60/471,663, filed on May 19, 2003.
(60) Provisional application No. 60/475,472, filed on Jun. 3, 2003.
(60) Provisional application No. 60/478,150, filed on Jun. 12, 2003.
(60) Provisional application No. 60/480,631, filed on Jun. 23, 2003.
(60) Provisional application No. 60/487,369, filed on Jul. 15, 2003.
(60) Provisional application No. 60/490,866, filed on Jul. 29, 2003.
(60) Provisional application No. 60/499,614, filed on Sep. 2, 2003.
(60) Provisional application No. 60/510,081, filed on Oct. 9, 2003.
(60) Provisional application No. 60/517,742, filed on Nov. 6, 2003.

(51) Int. Cl. G01N 33/574

(52) U.S. Cl. 435/7.23

(57) ABSTRACT

The present invention relates to methods for the diagnosis and treatment of a cancer or cancer. Specifically, the present invention identifies the differential expression of 15986, 2188, 20743, 9148, 9151, 9791, 44252, 14184, 42461, 8204, 7970, 25552, 21657, 26492, 2411, 15088, 1905, 28899, 63380, 33935, 10480, 12686, 25501, 17694, 15701, 53062, 49908, 21612, 38949, 6216, 46863, 9235, 2201, 6985, 9883, 12238, 18057, 21617, 39228, 49928, 54476, 62113, 64316, 12264, 32362, 58198, 2887, 3205, 8557, 9600, 9693, 44867, 53058, 55556, 57658, 2208, 10252, 10302, 14218, 33877, 10317, 10485, 25964, 14815, 1363, 1397, 14827, 21708, 3801, 64698, 2179 and 13249 genes in tissues relating to cancer, relative to their expression in normal, or non-cancer disease states, and/or in response to manipulations relevant to a cancer. The present invention describes methods for the diagnostic evaluation and prognosis of various cancers, and for the identification of subjects exhibiting a predisposition to such conditions. The invention also provides methods for identifying a compound capable of modulating a cancer or cancer. The present invention also provides methods for the identification and therapeutic use of compounds as treatments of cancer.

### RELATED APPLICATIONS

[0001] The present application claims the benefit of U.S. Provisional Application Ser. No. 60/435,108, filed on Dec. 20, 2002, of U.S. Provisional Application Ser. No. 60/436,443, filed on Dec. 23, 2002, of U.S. Provisional Application Ser. No. 60/438,498, filed on Jan. 7, 2003, of U.S. Provisional Application Ser. No. 60/444,370, filed on Jan. 31, 2003, of U.S. Provisional Application Ser. No. 60/446,031, filed on Feb. 6, 2003, of U.S. Provisional Application Ser. No. 60/453,635, filed on Mar. 11, 2003, of U.S. Provisional Application Ser. No. 60/457,199, filed on Mar. 25, 2003, of U.S. Provisional Application Ser. No. 60/462,458, filed on Apr. 10, 2003, of U.S. Provisional Application Ser. No. 60/466,732, filed on Apr. 30, 2003, of U.S. Provisional Application Ser. No. 60/469,184, filed on May 8, 2003, of U.S. Provisional Application Ser. No. 60/471,663, filed on May 19, 2003, of U.S. Provisional Application Ser. No. 60/475,472, filed on Jun. 3, 2003, of U.S. Provisional Application Ser. No. 60/478,150, filed on Jun. 12, 2003, of U.S. Provisional Application Ser. No. 60/480,631, filed on Jun. 23, 2003, of U.S. Provisional Application Ser. No. 60/487,369, filed on Jul. 15, 2003, of U.S. Provisional Application Ser. No. 60/490,866, filed on Jul. 29, 2003, of U.S. Provisional Application Ser. No. 60/499,614, filed on Sep. 2, 2003, of U.S. Provisional Application Ser. No. 60/510,081, filed on Oct. 9, 2003 and of U.S. Provisional Application Ser. No. 60/517,742, filed on Nov. 6, 2003. The entire contents of these provisional patent applications are hereby incorporated in their entirety by this reference.

### BACKGROUND OF THE INVENTION

[0002] Cancer can be viewed as a breakdown in the communication between tumor cells and their environment, including their normal neighboring cells. Growth-stimulatory and growth-inhibitory signals are routinely exchanged between cells within a tissue. Normally, cells do not divide in the absence of stimulatory signals or in the presence of inhibitory signals. In a cancerous or neoplastic state, a cell acquires the ability to “override” these signals and to proliferate under conditions in which a normal cell would not.

[0003] In general, tumor cells must acquire a number of distinct aberrant traits in order to proliferate in an abnormal manner. Reflecting this requirement is the fact that the genomes of certain well-studied tumors carry several different independently altered genes, including activated oncogenes and inactivated tumor suppressor genes. In addition to abnormal cell proliferation, cells must acquire several other traits for tumor progression to occur. For example, early on in tumor progression, cells must evade the host immune system. Further, as tumor mass increases, the tumor must acquire vasculature (e.g. through neo-angiogenesis) to supply nourishment and remove metabolic waste. Additionally, cells must acquire an ability to invade adjacent tissue. In many cases cells ultimately acquire the capacity to metastasize to distant sites.

[0004] Angiogenesis is a fundamental process by which new blood vessels are formed, as reviewed, for example, by Folkman and Shing, J. Biol. Chem. 267:10931-10934 (1992). Capillary blood vessels consist of endothelial cells and pericytes. These two cell types carry all of the genetic information to form tubes, branches and whole capillary networks. Specific angiogenic molecules and growth factors can initiate this process. Specific inhibitory molecules can stop it. These molecules with opposing function appear to be continuously acting in concert to maintain a stable microvasculature in which endothelial cell turnover is thousands of days. However, the same endothelial cells can undergo rapid proliferation, i.e. less than five days, during burst of angiogenesis, for example, during wound healing.

[0005] Key components of the angiogenic process are the degradation of the basement membrane, the migration and proliferation of capillary endothelial cell (EC) and the formation of three dimensional capillary tubes. The normal vascular turnover is rather low: the doubling time for capillary endothelium is from 50-20,000 days, but it is 2-13 days for tumor capillary endothelium. The current understanding of the sequence of events leading to angiogenesis is that a cytokine capable of stimulating endothelial cell proliferation, such as fibroblast growth factor (FGF), causes release of collagenase or plasminogen activator which, in turn, degrade the basement membrane of the parent venule to facilitate the migration of the endothelial cells. These capillary cells, having sprouted from the parent vessel, proliferate in response to growth factors and angiogenic agents in the surrounding environment to form lumen and eventually new blood vessels.

[0006] The development of a vascular blood supply is essential in reproduction, development and wound repair (Folkman, et al., Science 43:1490-1493 (1989)). Under these conditions, angiogenesis is highly regulated, so that it is turned on only as necessary, usually for brief periods of days, then completely inhibited. However, a number of serious diseases are also dominated by persistent unregulated angiogenesis and/or abnormal neovascularization including solid tumor growth and metastasis, psoriasis, endometriosis, Grave's disease, ischemic disease (e.g., atherosclerosis), and chronic inflammatory diseases (e.g., rheumatoid arthritis), and some types of eye disorders, (reviewed by Auerbach, et al., J. Microvasc. Res. 29:401-411 (1985); Folkman, Advances in Cancer Research, eds. Klein and Weinhouse, pp. 175-203 (Academic Press, New York, 1985); Patz, Am. J. Opthalmol. 94:715-743 (1982); and Folkman, et al., Science 221:719-725 (1983)). For example, there are a number of eye diseases, many of which lead to blindness, in which ocular neovascularization occurs in response to the diseased state. These ocular disorders include diabetic retinopathy, macular degeneration, neovascular glaucoma, inflammatory diseases and ocular tumors (e.g., retinoblastoma). There are a number of other eye diseases which are also associated with neovascularization, including retrolental fibroplasia, uveitis, eye diseases associated with choroidal neovascularization and eye diseases which are associated with iris neovascularization.

[0007] It is apparent that the complex process of tumor development and growth must involve multiple gene products. It is therefore important to define the role of specific genes involved in tumor development and growth and identify those genes and gene products that can serve as targets for the diagnosis, prevention and treatment of cancers.

[0008] In the realm of cancer therapy it often happens that a therapeutic agent that is initially effective for a given patient becomes, overtime, ineffective or less effective for that patient. The very same therapeutic agent may continue to be effective over a long period of time for a different patient. Further, a therapeutic agent that is effective, at least initially, for some patients can be completely ineffective or even harmful for other patients. Accordingly, there exists a need to identify genes and/or gene products that represent prognostic markers with respect to a given therapeutic agent or class of therapeutic agents. It then may be possible to determine which patients will benefit from particular therapeutic regimen and, importantly, determine when, if ever, the therapeutic regime begins to lose its effectiveness for a given patient. The ability to make such predictions would make it possible to discontinue a therapeutic regime that has lost its effectiveness well before its loss of effectiveness becomes apparent by conventional measures

### DESCRIPTION OF THE INVENTION

[0009] The present invention provides methods and compositions for the diagnosis and treatment of cancer and/or angiogenic disorders, including but not limited to cancers of the lung, ovary, prostate, breast or colon, or conditions characterized by an increase or decrease in angiogenesis. The polypeptides and nucleic acids of the invention can also be used to treat, prevent, and/or diagnose cancers and neoplastic conditions in addition to the ones described above. As used herein, the terms “cancer”, “hyperproliferative” and “neoplastic” refer to cells having the capacity for autonomous growth, i.e., an abnormal state or condition characterized by rapidly proliferating cell growth. Hyperproliferative and neoplastic disease states may be categorized as pathologic, i.e., characterizing or constituting a disease state, or may be categorized as non-pathologic, i.e., a deviation from normal but not associated with a disease state. The term is meant to include all types of cancerous growths or oncogenic processes, metastatic tissues or malignantly transformed cells, tissues, or organs, irrespective of histopathologic type or stage of invasiveness. “Pathologic hyperproliferative” cells occur in disease states characterized by malignant tumor growth. Examples of non-pathologic hyperproliferative cells include proliferation of cells associated with wound repair.

[0010] In one aspect, the invention provides methods for identifying a compound capable of treating a cancer and/or angiogenic disease. The method includes assaying the ability of the compound to modulate 15986, 2188, 20743, 9148, 9151, 9791, 44252, 14184, 42461, 8204, 7970, 25552, 21657, 26492, 2411, 15088, 1905, 28899, 63380, 33935, 10480, 12686, 25501, 17694, 15701, 53062, 49908, 21612, 38949, 6216, 46863, 9235, 2201, 6985, 9883, 12238, 18057, 21617, 39228, 49928, 54476, 62113, 64316, 12264, 32362, 58198, 2887, 3205, 8557, 9600, 9693, 44867, 53058, 55556, 57658, 2208, 10252, 10302, 14218, 33877, 10317, 10485, 25964, 14815, 1363, 1397, 14827, 21708, 3801, 64698, 2179 or 13249 nucleic acid expression or 15986, 2188, 20743, 9148, 9151, 9791, 44252, 14184, 42461, 8204, 7970, 25552, 21657, 26492, 2411, 15088, 1905, 28899, 63380, 33935, 10480, 12686, 25501, 17694, 15701, 53062, 49908, 21612, 38949, 6216, 46863, 9235, 2201, 6985, 9883, 12238, 18057, 21617, 39228, 49928, 54476, 62113, 64316, 12264, 32362, 58198, 2887, 3205, 8557, 9600, 9693, 44867, 53058, 55556, 57658, 2208, 10252, 10302, 14218, 33877, 10317, 10485, 25964, 14815, 1363, 1397, 14827, 21708, 3801, 64698, 2179 or 13249 polypeptide activity. In one embodiment, the ability of the compound to modulate 15986, 2188, 20743, 9148, 9151, 9791, 44252, 14184, 42461, 8204, 7970, 25552, 21657, 26492, 2411, 15088, 1905, 28899, 63380, 33935, 10480, 12686, 25501, 17694, 15701, 53062, 49908, 21612, 38949, 6216, 46863, 9235, 2201, 6985, 9883, 12238, 18057, 21617, 39228, 49928, 54476, 62113, 64316, 12264, 32362, 58198, 2887, 3205, 8557, 9600, 9693, 44867, 53058, 55556, 57658, 2208, 10252, 10302, 14218, 33877, 10317, 10485, 25964, 14815, 1363, 1397, 14827, 21708, 3801, 64698, 2179 or 13249 nucleic acid expression or 15986, 2188, 20743, 9148, 9151, 9791, 44252, 14184, 42461, 8204, 7970, 25552, 21657, 26492, 2411, 15088, 1905, 28899, 63380, 33935, 10480, 12686, 25501, 17694, 15701, 53062, 49908, 21612, 38949, 6216, 46863, 9235, 2201, 6985, 9883, 12238, 18057, 21617, 39228, 49928, 54476, 62113, 64316, 12264, 32362, 58198, 2887, 3205, 8557, 9600, 9693, 44867, 53058, 55556, 57658, 2208, 10252, 10302, 14218, 33877, 10317, 10485, 25964, 14815, 1363, 1397, 14827, 21708, 3801, 64698, 2179 or 13249 polypeptide activity is determined by detecting modulation of tumorigenesis or angiogenesis in a cell.

[0011] In another aspect, the invention provides methods for identifying a compound capable of modulating tumorigenesis or angiogenesis. The method includes contacting a cell expressing a 15986, 2188, 20743, 9148, 9151, 9791, 44252, 14184, 42461, 8204, 7970, 25552, 21657, 26492, 2411, 15088, 1905, 28899, 63380, 33935, 10480, 12686, 25501, 17694, 15701, 53062, 49908, 21612, 38949, 6216, 46863, 9235, 2201, 6985, 9883, 12238, 18057, 21617, 39228, 49928, 54476, 62113, 64316, 12264, 32362, 58198, 2887, 3205, 8557, 9600, 9693, 44867, 53058, 55556, 57658, 2208, 10252, 10302, 14218, 33877, 10317, 10485, 25964, 14815, 1363, 1397, 14827, 21708, 3801, 64698, 2179 or 13249 nucleic acid or polypeptide with a test compound and assaying the ability of the test compound to modulate the expression of a 15986, 2188, 20743, 9148, 9151, 9791, 44252, 14184, 42461, 8204, 7970, 25552, 21657, 26492, 2411, 15088, 1905, 28899, 63380, 33935, 10480, 12686, 25501, 17694, 15701, 53062, 49908, 21612, 38949, 6216, 46863, 9235, 2201, 6985, 9883, 12238, 18057, 21617, 39228, 49928, 54476, 62113, 64316, 12264, 32362, 58198, 2887, 3205, 8557, 9600, 9693, 44867, 53058, 55556, 57658, 2208, 10252, 10302, 14218, 33877, 10317, 10485, 25964, 14815, 1363, 1397, 14827, 21708, 3801, 64698, 2179 or 13249 nucleic acid or the activity of a 15986, 2188, 20743, 9148, 9151, 9791, 44252, 14184, 42461, 8204, 7970, 25552, 21657, 26492, 2411, 15088, 1905, 28899, 63380, 33935, 10480, 12686, 25501, 17694, 15701, 53062, 49908, 21612, 38949, 6216, 46863, 9235, 2201, 6985, 9883, 12238, 18057, 21617, 39228, 49928, 54476, 62113, 64316, 12264, 32362, 58198, 2887, 3205, 8557, 9600, 9693, 44867, 53058, 55556, 57658, 2208, 10252, 10302, 14218, 33877, 10317, 10485, 25964, 14815, 1363, 1397, 14827, 21708, 3801, 64698, 2179 or 13249 polypeptide.

[0012] In yet another aspect, the invention features a method for treating a subject having a cancer and/or angiogenic disorder e.g., a cancer and/or angiogenic disorder characterized by aberrant 15986, 2188, 20743, 9148, 9151, 9791, 44252, 14184, 42461, 8204, 7970, 25552, 21657, 26492, 2411, 15088, 1905, 28899, 63380, 33935, 10480, 12686, 25501, 17694, 15701, 53062, 49908, 21612, 38949, 6216, 46863, 9235, 2201, 6985, 9883, 12238, 18057, 21617, 39228, 49928, 54476, 62113, 64316, 12264, 32362, 58198, 2887, 3205, 8557, 9600, 9693, 44867, 53058, 55556, 57658, 2208, 10252, 10302, 14218, 33877, 10317, 10485, 25964, 14815, 1363, 1397, 14827, 21708, 3801, 64698, 2179 or 13249 polypeptide activity or aberrant 15986, 2188, 20743, 9148, 9151, 9791, 44252, 14184, 42461, 8204, 7970, 25552, 21657, 26492, 2411, 15088, 1905, 28899, 63380, 33935, 10480, 12686, 25501, 17694, 15701, 53062, 49908, 21612, 38949, 6216, 46863, 9235, 2201, 6985, 9883, 12238, 18057, 21617, 39228, 49928, 54476, 62113, 64316, 12264, 32362, 58198, 2887, 3205, 8557, 9600, 9693, 44867, 53058, 55556, 57658, 2208, 10252, 10302, 14218, 33877, 10317, 10485, 25964, 14815, 1363, 1397, 14827, 21708, 3801, 64698, 2179 or 13249 nucleic acid expression. The method includes administering to the subject a therapeutically effective amount of a 15986, 2188, 20743, 9148, 9151, 9791, 44252, 14184, 42461, 8204, 7970, 25552, 21657, 26492, 2411, 15088, 1905, 28899, 63380, 33935, 10480, 12686, 25501, 17694, 15701, 53062, 49908, 21612, 38949, 6216, 46863, 9235, 2201, 6985, 9883, 12238, 18057, 21617, 39228, 49928, 54476, 62113, 64316, 12264, 32362, 58198, 2887, 3205, 8557, 9600, 9693, 44867, 53058, 55556, 57658, 2208, 10252, 10302, 14218, 33877, 10317, 10485, 25964, 14815, 1363, 1397, 14827, 21708, 3801, 64698, 2179 or 13249 modulator (e.g., using a pharmaceutically acceptable formulation or a gene therapy vector). In one embodiment, the 15986, 2188, 20743, 9148, 9151, 9791, 44252, 14184, 42461, 8204, 7970, 25552, 21657, 26492, 2411, 15088, 1905, 28899, 63380, 33935, 10480, 12686, 25501, 17694, 15701, 53062, 49908, 21612, 38949, 6216, 46863, 9235, 2201, 6985, 9883, 12238, 18057, 21617, 39228, 49928, 54476, 62113, 64316, 12264, 32362, 58198, 2887, 3205, 8557, 9600, 9693, 44867, 53058, 55556, 57658, 2208, 10252, 10302, 14218, 33877, 10317, 10485, 25964, 14815, 1363, 1397, 14827, 21708, 3801, 64698, 2179 or 13249 modulator may be a small molecule, an anti-15986, 2188, 20743, 9148, 9151, 9791, 44252, 14184, 42461, 8204, 7970, 25552, 21657, 26492, 2411, 15088, 1905, 28899, 63380, 33935, 10480, 12686, 25501, 17694, 15701, 53062, 49908, 21612, 38949, 6216, 46863, 9235, 2201, 6985, 9883, 12238, 18057, 21617, 39228, 49928, 54476, 62113, 64316, 12264, 32362, 58198, 2887, 3205, 8557, 9600, 9693, 44867, 53058, 55556, 57658, 2208, 10252, 10302, 14218, 33877, 10317, 10485, 25964, 14815, 1363, 1397, 14827, 21708, 3801, 64698, 2179 or 13249 antibody, a 15986, 2188, 20743, 9148, 9151, 9791, 44252, 14184, 42461, 8204, 7970, 25552, 21657, 26492, 2411, 15088, 1905, 28899, 63380, 33935, 10480, 12686, 25501, 17694, 15701, 53062, 49908, 21612, 38949, 6216, 46863, 9235, 2201, 6985, 9883, 12238, 18057, 21617, 39228, 49928, 54476, 62113, 64316, 12264, 32362, 58198, 2887, 3205, 8557, 9600, 9693, 44867, 53058, 55556, 57658, 2208, 10252, 10302, 14218, 33877, 10317, 10485, 25964, 14815, 1363, 1397, 14827, 21708, 3801, 64698, 2179 or 13249 polypeptide, an antisense 15986, 2188, 20743, 9148, 9151, 9791, 44252, 14184, 42461, 8204, 7970, 25552, 21657, 26492, 2411, 15088, 1905, 28899, 63380, 33935, 10480, 12686, 25501, 17694, 15701, 53062, 49908, 21612, 38949, 6216, 46863, 9235, 2201, 6985, 9883, 12238, 18057, 21617, 39228, 49928, 54476, 62113, 64316, 12264, 32362, 58198, 2887, 3205, 8557, 9600, 9693, 44867, 53058, 55556, 57658, 2208, 10252, 10302, 14218, 33877, 10317, 10485, 25964, 14815, 1363, 1397, 14827, 21708, 3801, 64698, 2179 or 13249 nucleic acid molecule, or a ribozyme.

[0013] As used herein, a “tumorigenic disease or disorder” includes a disease or disorder characterized by aberrantly regulated cell growth, proliferation, differentiation, adhesion, or migration, resulting in the production of or tendency to produce tumors. As used herein, a “tumor” includes a normal benign or malignant mass of tissue. Examples of tumorigenic diseases include cancer, e.g., carcinoma, sarcoma, lymphoma or leukemia, examples of which include, but are not limited to, ovarian, lung, breast, endometrial, uterine, hepatic, gastrointestinal, prostate, colorectal, and brain cancer.

[0014] As used herein, the term angiogenic disease or disorder” includes a disease or disorder characterized by aberrantly regulated angiogenesis. As used herein, the term “angiogenesis” refers to the process by which new blood vessels, e.g., blood capillaries, vessels, and veins are formed. Key components of the angiogenic process are the degradation of the basement membrane, the migration and proliferation of capillary endothelial cell (EC) and the formation of three-dimensional capillary tubes. New blood vessels can develop from the walls of existing small vessels by the outgrowth of endothelial cells. Angiogenesis is also involved in tumor growth as it provides tumors with the blood supply necessary for tumor cell survival and proliferation (growth). Examples of angiogenic diseases include solid tumor growth and metastasis, psoriasis, endometriosis, Grave's disease, ischemic disease (e.g., atherosclerosis), and chronic inflammatory diseases (e.g., rheumatoid arthritis), and some types of eye disorders, (reviewed by Auerbach, et al., J. Microvasc. Res. 29:401-411 (1985); Folkman, Advances in Cancer Research, eds. Klein and Weinhouse, pp. 175-203 (Academic Press, New York, 1985); Patz, Am. J. Opthalmol. 94:715-743 (1982); and Folkman, et al., Science 221:719-725 (1983)). For example, there are a number of eye diseases, many of which lead to blindness, in which ocular neovascularization occurs in response to the diseased state. These ocular disorders include diabetic retinopathy, macular degeneration, neovascular glaucoma, inflammatory diseases and ocular tumors (e.g., retinoblastoma). There are a number of other eye diseases which are also associated with neovascularization, including retrolental fibroplasia, uveitis, eye diseases associated with choroidal neovascularization and eye diseases which are associated with iris neovascularization.

[0015] Examples of cellular proliferative and/or differentiative disorders include cancer, e.g., carcinoma, sarcoma, or metastatic disorders. The molecules of the present invention can act as novel diagnostic targets and therapeutic agents for controlling breast cancer, ovarian cancer, colon cancer, lung cancer, prostatic cancer, squamous carcinoma of the cervix, as well as metastasis of such cancers and the like. A metastatic tumor can arise from a multitude of primary tumor types, including but not limited to those of breast, lung, liver, colon, ovarian origin, and colom-liver. A cellular proliferative disorder can be an endothelial cell disorder. As used herein, an “endothelial cell disorder” includes a disorder characterized by aberrant, unregulated, or unwanted endothelial cell activity, e.g., proliferation, migration, angiogenesis, or vascularization; or aberrant expression of cell surface adhesion molecules or genes associated with angiogenesis, e.g., TIE-2, FLT and FLK. Endothelial cell disorders include tumorigenesis, tumor metastasis, psoriasis, diabetic retinopathy, endometriosis, Grave's disease, ischemic disease (e.g., atherosclerosis), and chronic inflammatory diseases (e.g., rheumatoid arthritis).

[0016] Examples of cancers or neoplastic conditions, in addition to the ones described above, include, but are not limited to, a fibrosarcoma, myosarcoma, liposarcoma, chondrosarcoma, osteogenic sarcoma, chordoma, angiosarcoma, endotheliosarcoma, lymphangiosarcoma, lymphangioendotheliosarcoma, synovioma, mesothelioma, Ewing's tumor, leiomyosarcoma, rhabdomyosarcoma, gastric cancer, esophageal cancer, rectal cancer, pancreatic cancer, ovarian cancer, prostate cancer, uterine cancer, cancer of the head and neck, skin cancer, brain cancer, squamous cell carcinoma, sebaceous gland carcinoma, papillary carcinoma, papillary adenocarcinoma, cystadenocarcinoma, medullary carcinoma, bronchogenic carcinoma, renal cell carcinoma, hepatoma, bile duct carcinoma, choriocarcinoma, seminoma, embryonal carcinoma, Wilm's tumor, cervical cancer, testicular cancer, small cell lung carcinoma, non-small cell lung carcinoma, bladder carcinoma, epithelial carcinoma, glioma, astrocytoma, medulloblastoma, craniopharyngioma, ependymoma, pinealoma, hemangioblastoma, acoustic neuroma, oligodendroglioma, meningioma, melanoma, neuroblastoma, retinoblastoma, leukemia, lymphoma, or Kaposi sarcoma.

[0017] Examples of cellular proliferative and/or differentiative disorders of the breast include, but are not limited to, proliferative breast disease including, e.g., epithelial hyperplasia, sclerosing adenosis, and small duct papillomas; tumors, e.g., stromal tumors such as fibroadenoma, phyllodes tumor, and sarcomas, and epithelial tumors such as large duct papilloma; carcinoma of the breast including in situ (noninvasive) carcinoma that includes ductal carcinoma in situ (including Paget's disease) and lobular carcinoma in situ, and invasive (infiltrating) carcinoma including, but not limited to, invasive ductal carcinoma, invasive lobular carcinoma, medullary carcinoma, colloid (mucinous) carcinoma, tubular carcinoma, and invasive papillary carcinoma, and miscellaneous malignant neoplasms. Disorders in the male breast include, but are not limited to, gynecomastia and carcinoma.

[0018] Examples of cellular proliferative and/or differentiative disorders of the lung include, but are not limited to, bronchogenic carcinoma, including paraneoplastic syndromes, bronchioloalveolar carcinoma, neuroendocrine tumors, such as bronchial carcinoid, miscellaneous tumors, and metastatic tumors; pathologies of the pleura, including inflammatory pleural effusions, noninflammatory pleural effusions, pneumothorax, and pleural tumors, including solitary fibrous tumors (pleural fibroma) and malignant mesothelioma. Preferred examples of lung tumors that can be treated include small cell carcinoma and poorly differentiated small cell carcinoma of the lung.

[0019] Examples of cellular proliferative and/or differentiative disorders of the colon include, but are not limited to, non-neoplastic polyps, adenomas, familial syndromes, colorectal carcinogenesis, colorectal carcinoma, and carcinoid tumors. Preferred examples of colon tumors include moderately differentiated tumors.

[0020] Examples of cellular proliferative and/or differentiative disorders of the ovary include, but are not limited to, ovarian tumors such as, tumors of coelomic epithelium, serous tumors, mucinous tumors, endometeriod tumors, clear cell adenocarcinoma, cystadenofibroma, brenner tumor, surface epithelial tumors; germ cell tumors such as mature (benign) teratomas, monodermal teratomas, immature malignant teratomas, dysgerminoma, endodermal sinus tumor, choriocarcinoma; sex cord-stomal tumors such as, granulosa-theca cell tumors, thecoma-fibromas, androblastomas, hill cell tumors, and gonadoblastoma; and metastatic tumors such as Krukenberg tumors.

[0021] Examples of prostatic cancerous disorders include adenocarcinoma or carcinoma, of the prostate and/or testicular tumors.

[0022] Examples of conditions characterized by an increase or decrease in angiogenesis include but are not limited to solid tumor growth and metastasis, psoriasis, endometriosis, Grave's disease, ischemic disease (e.g., atherosclerosis), and chronic inflammatory diseases (e.g., rheumatoid arthritis), and some types of eye disorders

[0023] “Treatment”, as used herein, is defined as the application or administration of a therapeutic agent to a patient, or application or administration of a therapeutic agent to an isolated tissue or cell line from a patient, who has a disease or disorder, a symptom of disease or disorder or a predisposition toward a disease or disorder, with the purpose of curing, healing, alleviating, relieving, altering, remedying, ameliorating, improving or affecting the disease or disorder, at least one symptom of disease or disorder or the predisposition toward a disease or disorder. A therapeutic agent includes, but is not limited to, small molecules, peptides, antibodies, ribozymes, gene therapy vectors and antisense oligonucleotides. Representative molecules are described herein.

[0024] The present invention is based, at least in part, on the discovery that nucleic acid and protein molecules, (described infra), are differentially expressed in disease states relative to their expression in normal, or non-disease states. The modulators of the molecules of the present invention, identified according to the methods of the invention, can be used to modulate (e.g., inhibit, treat, or prevent) or diagnose a disease, including, but not limited to, a cancer including but not limited to cancers of the lung, ovary, prostate, breast, colon or other disease state characterized by modulation of angiogenesis.

[0025] The modulators of the molecules of the present invention can include but are not limited to small organic molecules, peptides, ribozymes, nucleic acid antisense molecules, gene therapy vectors or antibodies.

[0026] “Differential expression”, as used herein, includes both quantitative as well as qualitative differences in the temporal and/or tissue expression pattern of a gene. Thus, a differentially expressed gene may have its expression activated or inactivated in normal versus disease conditions. The degree to which expression differs in normal versus disease or control versus experimental states need only be large enough to be visualized via standard characterization techniques, e.g., quantitative PCR, Northern analysis, subtractive hybridization. The expression pattern of a differentially expressed gene may be used as part of a prognostic or diagnostic of a disease, e.g., a cancer including but not limited to cancers of the lung, ovary, prostate, breast, colon or other disease state characterized by modulation of angiogenesis evaluation, or may be used in methods for identifying compounds useful for the treatment of a disease, e.g., a cancer including but not limited to cancers of the lung, ovary, prostate, breast or colon. In addition, a differentially expressed gene involved in a disease may represent a target gene such that modulation of the level of target gene expression or of target gene product activity will act to cure, heal, alleviate, relieve, alter, remedy, ameliorate, improve or affect a disease condition, e.g., a cancer including but not limited to cancers of the lung, ovary, prostate, breast, colon or other disease state characterized by modulation of angiogenesis. Compounds that modulate target gene expression or activity of the target gene product can be used in the treatment of a disease. Although the genes described herein may be differentially expressed with respect to a disease, and/or their products may interact with gene products important to a disease, the genes may also be involved in mechanisms important to additional disease cell processes.

[0027] Molecules of the Present Invention

[0028] The molecules of the present invention can be characterized as, or have structural features in common with, molecules of the following functional classes, including but not limited to:

[0029] Transferases:

[0030] MTAP/PNP family of phosphorylases

[0031] 2-oxo acid dehydrogenases acyltransferase

[0032] adenylate-kinase

[0033] 1-acyl-sn-glycerol-3-phosphate acyltransferase

[0034] AIR synthase and relatives

[0035] class II aldolase domain

[0036] Aminotransferases

[0037] AMP-binding enzymes

[0038] arginine N-methyltransferase

[0039] Arginosuccinate synthase

[0040] NAD:arginine ADP-ribosyltransferase

[0041] Asparagine synthase

[0042] Asp and Glu kinases

[0043] ATP:guanido phosphotransferases

[0044] ATP synthase

[0045] bile acid CoA:amino acid N-acyltransferase

[0046] Biopterin-dependent aromatic amino acid hydroxylase

[0047] biotin-requiring enzymes

[0048] Beta-ketoacyl synthase

[0049] biotin-protein ligase

[0050] Carbohydrate phosphorylases

[0051] carnitate acyltransferase

[0052] CDP-alcohol phosphatidyltransferase

[0053] choline transferases

[0054] CoA ligases

[0055] Coenzyme A transferase

[0056] Cys/Met metabolism PLP-dependent enzyme

[0057] diacylglycerol kinase

[0058] Delta-aminolevulinic acid dehydratase

[0059] Dihydrodipicolinate synthetase family

[0060] Enol-ase

[0061] FGGY carbohydrate kinase family

[0062] Formyl transferase

[0063] fucosyltransferases

[0064] Galactose-1-phosphate uridyl transferase

[0065] galactosyl-transferases

[0066] Phosphoribosylglycinamide synthetase (GARS)

[0067] Type 1 glutamine amidotransferases

[0068] Type II glutamine amidotransferases

[0069] gamma-glutamyltransferase

[0070] GHMP kinases

[0071] Glutamine synthetase

[0072] glycosyl tferases group 2

[0073] type 4 glycosyl transferases

[0074] Glycosyl transferases group 1

[0075] guanylate cyclases

[0076] Hexokinase

[0077] Hydroxymethylglutaryl-coenzyme A synthase

[0078] Lyase

[0079] vitamin-B 12 dependent methionine synthase

[0080] mRNA capping enzyme

[0081] arylamine N-acetyltransferase

[0082] nucleoside diphosphate kinase

[0083] glucosaminyl N-deacetylase/N-sulphotransferase

[0084] Myristoyl-CoA:protein N-myristoyltransferase

[0085] NNMT/PNMT/TEMT methyltransferase family

[0086] Nucleotidyl transferase

[0087] 6-O-methylguanine DNA methyltransferase

[0088] Orotidine phosphate decarboxylases

[0089] O-methyltransferase

[0090] OTCase/ATCase

[0091] phenylalanine and histidine ammonia-lyases

[0092] poly(ADP-ribose) polymerase

[0093] Phosphatidate cytidylyltransferase

[0094] phosphoenolpyruvate carboxykinase

[0095] pfkB family carbohydrate kinase

[0096] Phosphofructokinase

[0097] Phosphoglycerate kinases

[0098] phosphoinositol-3-kinases

[0099] phosphatidylinositol-4-phosphate 5-kinase

[0100] eukaryotic protein kinases

[0101] polyprenyl synthetases

[0102] protein prenyltransferases

[0103] Purine/pyrimidine phosphoribosyl transferases

[0104] Phosphoribosyl pyrophosphate synthetase

[0105] 6-pyruvoyl tetrahydropterin synthase

[0106] Pyridoxal-dependent decarboxylase

[0107] Pyridoxal-dependent decarboxylase conserved domain

[0108] pyridoxine kinases

[0109] pyruvate-kinase

[0110] Rhodanese

[0111] Ribosomal RNA adenine dimethylases

[0112] S-adenosylmethionine synthetase

[0113] SAICAR synthetase

[0114] Serine hydroxymethyltransferase

[0115] sialyltransferases

[0116] sterol O-acyltransferases

[0117] SpoU rRNA Methylase family

[0118] Squalene and phytoene synthases

[0119] serine/threonine dehydratases

[0120] sulfotransferases

[0121] Transaldolase

[0122] Trehalose-6-phosphate synthase domain

[0123] Tetrapyrrole (Corrin/Porphyrin) Methylases.

[0124] thymidine kinase

[0125] thiopurine methyltransferase

[0126] Thiamine Pyrophosphate requiring enzymes

[0127] Transglutaminase family

[0128] Transketolase

[0129] thymidylate synthase

[0130] ubiE/COQ5 methyltransferase family

[0131] UDP-glycosyltransferase

[0132] vitamin-K dependent gamma carboxylase

[0133] Oxidoreductases:

[0134] D-isomer specific 2-hydroxyacid dehydrogenase

[0135] 3-beta hydroxysteroid dehydrogenase/isomerase

[0136] 3-hydroxyacyl-CoA dehydrogenase

[0137] Acyl-CoA dehydrogenases

[0138] Zinc-containing alcohol dehydrogenases

[0139] adrenodoxin oxidoreductase

[0140] AhpC/TSA antioxidant enzyme family

[0141] aldehyde dehydrogenases

[0142] aldo/keto reductases

[0143] billiverdin reductase family

[0144] C-4 methyl sterol oxidase

[0145] C-5 cytosine-specific DNA methylase

[0146] cyclooxygenases

[0147] copper amine oxidases

[0148] FAD/NAD-binding Cytochrome reductase

[0149] D-amino acid oxidases

[0150] Molybdopterin binding domain in dehydrogenase

[0151] fatty acid desaturases

[0152] Dihydrofolate reductase

[0153] E1 dehydrogenases

[0154] Glutamate/Leucine/Phenylalanine/Valine dehydrogena

[0155] FAD-dependent glycerol-3-phosphate dehydrogenase

[0156] FMN-dependent dehydrogenase

[0157] Flavin-binding monooxygenase-like

[0158] Glucose-6-phosphate dehydrogenase

[0159] glutathione peroxidases

[0160] GMC oxidoreductases

[0161] IMP dehydrogenase/GMP reductase

[0162] Isocitrate and isopropylmalate dehydrogenases

[0163] lactate/malate dehydrogenase

[0164] lipoxygenase

[0165] NAD dependent epimerase/dehydratase family

[0166] NAD-dependent glycerol-3-phosphate dehydrogenase

[0167] NADH dehydrogenases

[0168] NADH-ubiquinone/plastoquinone oxidoreductase chain

[0169] Nitroreductase family

[0170] NO Synthase

[0171] Oxidoreductase FAD/NAD-binding domain

[0172] Delta 1-pyrroline-5-carboxylate reductase

[0173] 6-phosphogluconate dehydrogenases

[0174] Alanine dehydrogenase/pyridine nucleotide transhyd

[0175] Oxidoreductase molybdopterin binding domain

[0176] ribonuclease reductases

[0177] steroid 5-alpha reductases

[0178] short-chain dehydrogenase/reductases

[0179] Succinate dehydrogenase cytochrome b subunit

[0180] Tetrahydrofolate dehydrogenase/cyclohydrolase

[0181] UDP-glucose/GDP-mannose dehydrogenases

[0182] Hydrolases:

[0183] alpha/beta hydrolases

[0184] acid ceramidase

[0185] acylphosphatase

[0186] acyl-transferase

[0187] adenosine deaminase

[0188] S-adenosyl-L-homocysteine hydrolase

[0189] AdoMet decarboxylase

[0190] amidases

[0191] arginases

[0192] Asparaginase

[0193] aspartyl proteases

[0194] astacin/m12a metalloproteases

[0195] Prenyl protease 2

[0196] Eukaryotic carbonic anhydrases

[0197] carboxylesterase

[0198] Clp family of ATP-dependent proteases

[0199] 2′, 3′ cyclic nucleotide 3′ phosphodiesterase

[0200] cytidine deaminases

[0201] disintegrin

[0202] dUTPase

[0203] esterases

[0204] Fructose-1-6-bisphosphatase

[0205] Alpha-L-fucosidase

[0206] metalloprotease family

[0207] Glycosyl hydrolase family 1

[0208] hyaluronidases

[0209] GTP cyclohydrolase I

[0210] haloacid dehalogenase-like hydrolases

[0211] hemoglobinase

[0212] heparanase

[0213] histone deacetylases

[0214] insulinase

[0215] lipoprotein lipase et al

[0216] lysophospholipases

[0217] peptidase family m17

[0218] metalloprotease family M41

[0219] leishmanolysin family of metalloproteases

[0220] M24 proteases

[0221] matrix metalloproteases

[0222] mutT/8-OXO-dGTPase

[0223] neprilysin family of proteases

[0224] nucleotide pyrophosphatase (alkaline phosphodieste

[0225] procollagen N-proteinase

[0226] 3′5′-cyclic nucleotide phosphodiesterase

[0227] ArgE/DapE/Acyl/Cpg2 family

[0228] Phosphorylase family

[0229] phospholipase A2

[0230] phospholipase C

[0231] phospholipase D

[0232] Porphobilinogen deaminase

[0233] pyrophosphatases

[0234] prolyl oligopeptidases

[0235] pyrimidine-nucleoside phosphorylases

[0236] GTPase-activators for Ras-like GTPases

[0237] renaldipeptidase

[0238] ADAM family of metalloprotease

[0239] serine carboxypeptidases

[0240] subtilase family of proteases

[0241] Sulfatase

[0242] Thioesterase domain

[0243] Thiolase

[0244] trehalase

[0245] trypsin-like serine proteases

[0246] Uracil-DNA glycosylase

[0247] Zinc carboxypeptidases

[0248] Zinc proteases

[0249] Isomerases:

[0250] enoyl-CoA hydratase/isomerase

[0251] sterol isomerase

[0252] Glucosamine-6-phosphate isomerase

[0253] Glyoxalase

[0254] Mannose-6-phosphate isomerase (faml)

[0255] methylacyl-CoA racemase

[0256] Macrophage migration inhibitory factor (MIF)

[0257] Phosphoglucose isomerase

[0258] phosphoglucomutase/phosphomannomutase

[0259] Phosphoglycerate mutase family

[0260] Triosephosphate isomerase

[0261] tRNA pseudouridine synthase

[0262] Other Enzymes and Receptors:

[0263] phorbol ester/DAG binding domain

[0264] phospholipid scramblase

[0265] Nuclear hormone receptors

[0266] G-protein coupled receptors

[0267] Serine/threonine kinases

[0268] Tyrosine kinases

[0269] Dual specificity kinases

[0270] Gene ID 15986

[0271] The human 15986 sequence (SEQ ID NO: 1) known also as Calcium/Calmodulin (CaM) CaMKI-like protein kinase (gi|9837341), is approximately 1579 nucleotides long including untranslated regions. The coding sequence, located at about nucleic acids 88 to 1161 in SEQ ID NO:1, encodes a 357 amino acid protein (SEQ ID NO:2).

[0272] As assessed by TaqMan analysis, 15986 mRNA was expressed at increased levels in a breast tumor pool (single sample pool of 3 tumors each) when compared to a normal breast tissue pool. Further TaqMan analysis on oncology tissue panels indicated that 15986 mRNA was expressed in 4/6 breast, in 3/6 ovary, in 3/5 lung and in 1/5 colon tumor samples when compared to three samples each of their respective normal tissue samples.

[0273] TaqMan analysis on an angiogenesis panel (fetal vs. adult tissues) indicated that 3/12 fetal tissues expressed higher levels of 15986 mRNA than 32/34 adult tissues. In particular, 15986 mRNA levels were higher in 1/1 fetal heart samples vs. 7/7 adult heart samples. TaqMan analysis on another angiogenesis panel (hemangiomas and necrotic and angiogenic tumors) indicated that 15986 mRNA was elevated in 4/8 hemangiomas vs. 1/1 normal skin tissue samples.

[0274] 15986 mRNA expression levels were also elevated in 1/4 breast, in 1/3 colon, and in 3/3 lung necrotic tumors vs.1/1 sample of their respective normal tissues and in 1/1 Wilm's tumor vs. 1/1 normal kidney tissue sample.

[0275] On a TaqMan panel evaluating in vitro endothelial cell proliferation, arrest and tube formation (EC/PAT), 15986 mRNA was elevated in 2/3 human umbilical vein endothelial cell (HUVEC) tube formation samples on matrigel vs. 1/1 arrested HUVEC sample.

[0276] TaqMan analysis of an expanded breast cancer panel indicated that 15986 mRNA expression was increased in 8/11 breast invasive ductal carcinoma tumors vs. 4/4 normal breast tissue samples. In addition, 15986 mRNA expression was increased in 2/5 breast metastases vs. 5/5 normal tissue samples from the site of metastasis and 4/4 normal breast tissue samples.

[0277] On an expanded lung panel, TaqMan analysis indicated that 15986 mRNA expression was increased in 13/33 primary lung tumors vs. 6/6 normal lung tissue samples.

[0278] As assessed by in situ hybridization (ISH), 15986 was expressed in primary ovary and breast cancers. Normal breast and ovarian tissues are negative for expression. Some angiogenic tissues such as fetal kidney also showed expression of 15986.

[0279] 15986, a CamKI-like protein kinase, is 82% homologous to human (sp|Q14012), rat (sp|Q63450) and mouse (gi|15928726) Ca2+/Calmodulin-dependent PKI. 15986 was shown to be active in an in vitro kinase assay, and it was demonstrated that the kinase activity is dependent on Ca2+/Calmodulin (Blood 2000 96(9): 3215-3223).

[0280] 15986 is involved in cytokine signal transduction pathways resulting in the activation of CREB and CREM. IL-8, one cytokine for which 15986 has been shown to be involved, is implicated in angiogenesis, tumor growth, and metastasis in a number of cancers, including melanoma and prostate cancer. CREB activation has been shown to be critical to tumor proliferation in a number of different settings (Blood 2000, 96, 3215-3223; Endocrinology 2002, 143, 3651-7; J Biol Chem 1996, 271, 20930-4; Biometals 1998, 11, 331-43; J Biol Chem 1999, 274, 10086-93; Crit Rev Immunol 2001, 21, 275-86 and Mol Cell Biochem 2000, 212, 29-34).

[0281] Due to 15986 function and expression, inhibitors of 15986 activity would inhibit tumor proliferation, angiogenesis and metastasis. Modulators of 15986 activity would be useful in treating human cancers, including but not limited to breast cancer, lung cancer and tumor angiogenesis. 15986 polypeptides of the present invention are useful in screening for modulators of 15986 activity.

[0282] Gene ID 2188

[0283] The human 2188 sequence (SEQ ID NO:3) known also as serum/glucocorticoid regulated kinase-like (SGKL), is approximately 2391 nucleotides long including untranslated regions. The coding sequence, located at about nucleic acids 22 to 1512 in SEQ ID NO:3, encodes a 496 amino acid protein (SEQ ID NO:4).

[0284] As assessed by TaqMan analysis, 2188 mRNA was expressed at increased levels in a colon tumor pool (single sample pool of 3 tumors each) when compared to a normal colon tissue pool. Further TaqMan analysis on an oncology panel indicated that 2188 mRNA was expressed in 3/6 breast, in 6/6 lung and in 2/5 colon tumors when compared to three samples each of their respective normal tissue, although expression was generally high in colon.

[0285] TaqMan analysis on an angiogenesis panel (fetal vs. adult tissues) indicated that 2188 mRNA expression was higher in 4/12 fetal tissues vs. 34/34 adult tissues. In particular, 2188 mRNA expression levels were high in 2/2 fetal liver and in 2/2 fetal kidney samples. TaqMan analysis on another angiogenesis panel (hemangiomas and necrotic and angiogenic tumors) indicated that 2188 mRNA expression was increased in 2/8 hemangiomas when compared to normal skin tissue and increased in necrotic tumors (1/3 ovary and 3/3 lung) relative to single samples of their respective normal tissues.

[0286] On a TaqMan panel evaluating in vitro endothelial cell proliferation, arrest and tube formation (EC/PAT), 2188 mRNA expression was elevated in 1/3 human umbilical vein endothelial cell (HUVEC) tube formation samples on matrigel vs. 2/2 arrested HUVEC cell samples.

[0287] TaqMan analysis of an expanded lung cancer panel indicated that 2188 mRNA expression was increased in 3/20 lung tumors with little or no expression in 4/4 normal lung tissue samples.

[0288] In situ hybridization experiments were designed to examine primary lung tumors, normal lung, and fetal tissues representative of angiogenic tissues. The results from the ISH experiments are consistent with the data observed by Taqman analysis.

[0289] SGK1 transcription is induced by the following agonists/conditions: Serum; Glucocorticoid; Mineralocorticoid; FSH; LH; Vasoactive intestinal polypeptide; Carbachol; TGF-β; GMCSF; FMLP; TNF-α; Thrombin; Lipopolysaccharides; Hypertonicity; High glucose; and Neuronal injury or excitotoxicity. However, SGKL transcription is not induced by serum or glucocorticoids (Lang & Cohen, Science STKE 2001, 108, re17, 1-11). SGK1, SGK2, and SGKL are activated by stimulation of cells by IGF-1 and oxidative stress. SGK1 activation by hydrogen peroxide is fully inhibited by wortmannin or LY294002, whereas SGK2 and SGKL activation is only partially inhibited. All three SGKs are activated by PDK1.

[0290] Known substrates for SGK1 include GSK3β, B-Raf, FKHRL1 (cell survival) and Nedd4 (ub ligase for ENaC, controls cell volume). Known substrates for SGKL include FKHRL1 and GSK-3β (BBRC 2002, 293, 1191-6). SGK1, SGK2, and SGKL upregulate Kv1 voltage-gated K (+) channels, although the direct substrate is not known. This effect may regulate epithelial transport, cell proliferation, and neuromuscular excitability (Pflugers Arch 2002, 445, 60-6). IGF-1 induced proliferation appears to require this regulation (Pflugers Arch 2002, 445, 625-34).

[0291] 2188 is an SGK protein kinase downstream of phosphatidyl-inositol-3-kinase (PI3K), regulating cell proliferation, apoptosis protection, and possibly cell volume. It acts independently of the AKTs due to its distinct localization following activation. 2188 is activated following stimulation by IL-3, IGF-1, or EGF. Inhibition of 2188 would prevent tumor cell proliferation and promote apoptosis at least in part by activation of FKHR-mediated pathways.

[0292] Due to 2188 function and expression, modulators of 2188 activity would be useful in treating human cancers, including but not limited to colon cancer, lung cancer and tumor angiogenesis. 2188 polypeptides of the present invention are useful in screening for modulators of 2188 activity.

[0293] Gene ID 20743

[0294] The human 20743 sequence (SEQ ID NO:5), also known as ribosomal protein kinase B (RSK-B), is approximately 3131 nucleotides long including untranslated regions. The coding sequence, located at about nucleic acids 66 to 2384 of SEQ ID NO:5, encodes a 772 amino acid protein (SEQ ID NO:6).

[0295] As assessed by TaqMan analysis, 20743 mRNA was expressed at low levels in most tissues. 20743 mRNA was highly expressed in human umbilical vein endothelial cells (HUVEC), coronary smooth muscle cells (SMC), brain and erythroid cells. 20743 mRNA was expressed at a 36-fold increased level in a primary colon tumor pool (single sample pool of 3 tumors each) when compared to a normal colon tissue pool.

[0296] Further TaqMan analysis on an oncology panel indicated that 20743 mRNA was expressed at 5 to 24-fold increased levels in 4/5 primary breast tumor samples vs. 2/3 normal breast samples, at 2 to 12-fold increased levels in 3/6 primary ovary tumor samples vs. 2/3 normal ovary samples, and at 150 to 210-fold increased levels in 2/4 primary colon tumors vs. 2/3 normal colon samples.

[0297] 20743 mRNA also showed expression in 5/5 lung tumor samples with no expression in 2/2 normal lung samples.

[0298] 20743 mRNA was expressed at 7-fold increased levels in a pooled colon liver metastases sample when compared to a normal liver sample and at 15-fold increased levels in proliferating human microvascular endothelial cells (HMVECs) when compared to arrested HMVECs.

[0299] TaqMan analysis on an expanded colon cancer tissue panel indicated that 20743 mRNA was expressed at 2 to 6-fold increased levels in 5/13 primary colon tumor samples vs. 4/6 normal colon samples. 20743 mRNA had very low expression in 6/6 liver samples, with higher expression in 3/3 colon metastases to liver.

[0300] In a TaqMan analysis on an ovarian cancer panel where cancer metastases are compared to their primary tumors, 20743 mRNA was expressed at 3 to 17-fold increased levels in 6/7 metastases when compared to their respective primary ovarian tumors.

[0301] In a TaqMan analysis on a PI3Kinase panel, 20743 mRNA expression was reduced 2 to 30-fold after 12 hrs of treatment with ˜8× the EC50 of phosphotidylinositol 3-kinase in the LNCaP, MDA-MB-468, MCF-7 Tet-Off and NCI-H125 cancer cell lines.

[0302] On a breast cancer cell model panel, 20743 mRNA expression in MCF10A cells was increased 4-fold by 8 hrs treatment of 10 ng/ml EGF and was increased 3-fold by 3 hrs treatment with 10 nM IGF1.

[0303] Finally, on an expanded lung cancer TaqMan panel, 20743 mRNA was expressed at increased levels (2-49 fold) in 11/33 primary lung tumor samples vs. 6/6 normal lung tissue samples.

[0304] The in situ hybridization experiments for 20743 indicate that this target is expressed primarily in primary colon and ovarian tumors, and colon metastases to the liver. Primary lung tumors express this gene, but at lower levels and in only a subset of tumors.

[0305] RSK-B has been identified as a novel ribosomal S6 kinase family member that is bound to p38 mitogen-activated kinase (MAPK) alpha in a yeast two-hybrid assay (J. Biol. Chem. 273(45): 29661-29671). RSK-B was found to be activated by p38alpha, as well as by ERK1, suggesting that RSK-B could represent a convergence point between the p38alpha and ERK1 MAPK pathways. The MAPK cascades are involved in the transduction of signals from mitogens and cellular stresses into appropriate cellular responses and are required for many functions including cell proliferation, differentiation, and survival (Nature 410: 37-40). The transcription factors cyclic AMP response element-binding protein (CREB) and c-fos were shown to be RSK-B substrates and RSK-B controlled CREB and AP-1 activities. A variety of stimuli, including tumor necrosis factor alpha, epidermal growth factor, phorbol 12-myristate 13-acetate and ionomycin, have been shown to induce phosphorylation and persistent activation of RSK-B through both p38 and ERK pathways (J. Biol. Chem. 275(31): 23549-23558, 2000). Studies in primary embryonic fibroblasts from RSK-B (also known as MSK-2) knockout mice showed that RSK-B is required for the mitogenic and stress-induced phosphorylation of transcription factors CREB and ATF-1 (Mol. Cell. Biol. 22(8): 2871-2881, 2002).

[0306] 20743 mRNA is expressed at increased levels in ovarian cancer metastases when compared to matched primary tumors. 20743 mRNA expression is increased in MCF10A cells by EGF and IGF1 treatment and decreased by inhibition of the PI3kinase signaling pathway, suggesting that 20743 is a downstream effector of growth/survival signals. 20743 is a known player in the mitogenic and stress-induced phosphorylation of transcription factors CREB and ATF-1. Inhibiting 20743 would block mitogen and stress-induced activating phosphorylation of CREB, thereby inhibiting tumor growth.

[0307] Due to 20743 function and expression, modulators of 20743 activity would be useful in treating human cancers, including but not limited to ovarian cancer. 20743 polypeptides of the present invention are useful in screening for modulators of 20743 activity.

[0308] Gene ID 9148

[0309] The human 9148 sequence (SEQ ID NO:7), also known as NAD(P)H dehydrogenase [quinone] (Quinone reductase 1) (QR1), DT-diaphorase (DTD) or Menadione reductase, is approximately 2447 nucleotides long including untranslated regions. The coding sequence, located at about nucleic acids 51 to 875 of SEQ ID NO:7, encodes a 274 amino acid protein (SEQ ID NO:8).

[0310] As assessed by TaqMan analysis, 9148 mRNA expression was increased in pooled colon tumors (single sample pool of 3 tissue samples), pooled lung tumors and pooled ovarian tumors relative to their respective pooled normal tissues. Other tissues showing high 9148 mRNA expression levels included coronary smooth muscle, human umbilical vein endothelial cells (HUVECs), and primary osteoblasts.

[0311] Further TaqMan analyses on oncology panels indicated that 9148 mRNA was expressed at increased levels in breast, lung, ovarian and colon tumors relative to their normal tissues. 9148 mRNA was expressed at very high levels in proliferating human microvascular endothelial cells (HMVECs) and in the human colorectal carcinoma cell line HCT116.

[0312] In an expanded colon cancer panel, 9148 mRNA expression was increased in hyperplastic colon samples, adenomatous polyps, adenomas and adenocarcinomas relative to normal colon samples. 9148 mRNA expression was also increased in colon metastases to the liver when compared to normal colon and normal liver.

[0313] 9148 encodes DT-diaphorase, an oxygen-independent reductase that participates in cytotoxic detoxification (Free Radic Res 2002;36(6):695-9). Upregulation of DT-diaphorase in tumors is currently being taken advantage of to activate bioreductive anti-tumor drugs (Curr Pharm Des 2002;8(15): 1319-33). However, DT-diaphorase may also metabolize toxins increased as a result of oncogenic signaling (Carcinogenesis 2000;21(10):1813-9). Therefore, selective inhibition of 9148 may result in an increase in naturally occurring cytotoxic compounds in hypoxic tumors, resulting in inhibition and/or reduction of tumor growth.

[0314] Due to 9148 function and expression, modulators of 9148 activity would be useful in treating human cancers, including but not limited to breast, lung and ovarian cancers. 9148 polypeptides of the present invention are useful in screening for modulators of 9148 activity.

[0315] Gene ID 9151

[0316] The human 9151 sequence (SEQ ID NO:9), also known as L-iditol-2 dehydrogenase (sorbitol dehydrogenase), is approximately 1808 nucleotides long including untranslated regions. The coding sequence, located at about nucleic acids 142 to 1215 of SEQ ID NO:9, encodes a 357 amino acid protein (SEQ ID NO:10).

[0317] As assessed by TaqMan analysis, 9151 mRNA expression was increased in pooled colon, pooled lung and pooled prostate tumors relative to their respective pooled normal tissues. Other tissues expressing high levels of 9151 mRNA included normal skeletal muscle, pituitary gland, brain, HUVECs and erythroid cells.

[0318] Further TaqMan analyses on oncology panels indicated that 9151 mRNA expression was increased in breast, lung and colon tumors relative to their normal tissues. 9151 mRNA was also expressed at very high levels in normal liver and in the human colorectal carcinoma cell line HCT116. In an expanded colon cancer panel, 9151 mRNA expression was increased in hyperplastic colon samples, adenomatous polyps, adenomas and adenocarcinomas relative to normal colon samples. 9151 mRNA expression was also increased in colon metastases to the liver when compared to normal colon.

[0319] 9151 encodes L-iditol-2 dehydrogenase (sorbitol dehydrogenase). Sorbitol dehydrogenase catalyzes the second of the 2-step polyol pathway, converting sorbitol (derived from dietary sources or glucose metabolism) to fructose (J Med Chem 2002;45:511-28). The function of sorbitol dehydrogenase in most tissues is unknown, although the polyol pathway likely plays an important role in the etiology of diabetic complications, and therefore it is important in glucose metabolism (Genomics 1997;46:86-92). Inhibition of 9151 may adversely affect glucose metabolism in cancer cells, resulting in an inhibition and/or reduction in tumor growth.

[0320] Due to 9151 function and expression, modulators of 9151 activity would be useful in treating human cancers, including but not limited to breast, colon and lung cancers. 9151 polypeptides of the present invention are useful in screening for modulators of 9151 activity.

[0321] Gene ID 9791

[0322] The human 9791 sequence (SEQ ID NO:11), also known as cholinephosphate cytidylyltransferase A, is approximately 1286 nucleotides long including untranslated regions. The coding sequence, located at about nucleic acids 46 to 1149 of SEQ ID NO: 11, encodes a 367 amino acid protein (SEQ ID NO:12).

[0323] As assessed by TaqMan analysis, 9791 mRNA was expressed at higher levels in colon tumor and lung tumor pools with respect to their normal tissue pools. 9791 mRNA was also highly expressed in HUVECs and skeletal muscle.

[0324] Further TaqMan analyses on oncology panels indicated that 9791 mRNA was expressed at increased levels in breast, ovary and lung tumors when compared to their respective normal tissue samples. TaqMan analysis on an angiogenesis panel (fetal vs. adult tissues) indicated that 9791 mRNA was highly expressed in fetal tissues including liver, adrenal, kidney, heart and umbilical cord relative to most adult angiogenic tissue samples. TaqMan analysis on an additional angiogenesis panel (hemangiomas, necrotic and angiogenic tumors) indicated that 9791 mRNA was expressed at higher levels in hemangiomas and necrotic tumors (breast, colon and lung tumors) relative to their normal controls.

[0325] In an expanded lung tumor panel, TaqMan analysis indicated that 9791 mRNA was increased in squamous cell carcinoma and small cell lung cancer tumors when compared to normal lung tissue samples. TaqMan analysis on xenograft-friendly cancer cell lines indicated that 9791 mRNA is expressed in all cancer cell lines evaluated, with particularly high levels of expression in MCF7, ZR75, DLD1 and SW620.

[0326] In situ hybridization (ISH) analysis of 9791 indicated increased expression of 9791 mRNA in breast and lung tumors relative to normal controls. In addition, hemangiomas and angiogenic fetal tissues expressed 9791 mRNA.

[0327] The CDP-choline pathway represents an important mechanism in inducing and amplifying phosphatidate (PA) and diacylglycerol (DAG) production from phosphatidylcholine by phospholipase D (PLD). The CDP-choline pathway is upregulated in response to Ras transformation. 9791 represents the rate-limiting step of this pathway. Downregulation of this pathway results in growth inhibition and apoptosis. Therefore, inhibition of 9791 would also result in growth inhibition and apoptosis.

[0328] Due to 9791 function and expression, modulators of 9791 activity would be useful in treating human cancers, including but not limited to tumor angiogenesis, breast and lung cancers. 9791 polypeptides of the present invention are useful in screening for modulators of 9791 activity.

[0329] Gene ID 44252

[0330] The human 44252 sequence (SEQ ID NO:13), also known as rabkinesin-6 (RAB6-interacting kinesin-like protein), is approximately 2972 nucleotides long including untranslated regions. The coding sequence, located at about nucleic acids 28 to 2700 of SEQ ID NO:13, encodes a 890 amino acid protein (SEQ ID NO:14).

[0331] As assessed by TaqMan analysis, 44252 mRNA expression was restricted to HUVECs, hemangioma, osteoblasts, neutrophils, erythroid cells and ovarian, colon, and lung tumor pools (single sample pool of 3 tissue isolates) with undetectable expression in normal colon and lung pools (single sample pool of 3 tissue samples).

[0332] Further TaqMan analyses on oncology panels indicated that 44252 mRNA was expressed at increased levels in 3/5 breast, in 4/5 ovary, in 4/6 lung and in 3/5 colon tumors when compared to their respective normal tissue samples (3/3 breast, 3/3 ovary, 2/2 lung, 3/3 colon). In addition, 44252 mRNA was expressed at higher levels in proliferating HMVECs when compared to arrested HMVEC.

[0333] TaqMan analysis on an angiogenesis panel (fetal vs. adult tissues) indicated that 44252 mRNA was highly expressed in fetal tissues including liver (2/2), kidney (2/2), and heart (1/1)) relative to adult angiogenic tissue samples (32/34). 44252 mRNA was only expressed in an endometrium tumor and a uterine tumor from the adult panel. TaqMan analysis on an additional angiogenesis panel (hemangiomas, necrotic and angiogenic tumors) indicated that 44252 mRNA was expressed at higher levels in 2/8 hemangiomas relative to 1/1 normal skin tissue samples. 44252 was also expressed at higher levels in necrotic tumors (2/3 colon and 3/4 ovarian tumors) relative to their normal controls (1/1 colon and 1/1 ovary). 44252 mRNA was also expressed at higher levels in Wilm's tumor (1/1) relative to the normal control (kidney (1/1)).

[0334] In an expanded ovary tumor panel, TaqMan analysis indicated that 44252 mRNA expression was increased in 5/11 serous ovarian tumors when compared to 5/5 normal ovary tissue samples. In addition, 44252 mRNA expression was increased in 1/3 clear cell ovarian cancer tumor sample when compared to 5/5 normal lung tissue samples. 44252 mRNA was also expressed at higher levels in fallopian tube primary tumor samples (2/2) when compared to normal fallopian tube tissue samples (2/2).

[0335] TaqMan analysis of the application of the PI3K inhibitor LY294002 demonstrated that 44252 was downregulated by PI3K inhibition after 12 h in 3/4 breast cancer cell lines evaluated. Taqman analysis also demonstrated that 44252 was upregulated in proliferating lung HMVEC (3/3) or HUVEC (1/1) relative to their normal controls (lung HMVEC (3/3) or HUVEC (1/1).

[0336] The ISH analysis for 44252 indicated very restricted expression. There was modest to high expression in breast and ovarian tumors and fetal liver. No expression was seen in normal ovary or breast tissue. This ISH data confirms the clinical TaqMan data.

[0337] In later stages of mitosis Rabkinesin-6 localized to the spindle midzone and appeared on the midbodies during cytokinesis. The functional significance of this localization during M phase was revealed by antibody microinjection studies which resulted exclusively in binucleate cells, showing a complete failure of cytokinesis. These results substantiate a crucial role for Rabkinesin-6 in late anaphase B and/or cytokinesis, clearly distinct from the role of MKLP-1 (Mol Cell Biol 2001, 21, 2944-55). Rabkinesin-6 accumulates in mitotic cells where it localizes to the midzone of the spindle during anaphase and to the cleavage furrow and midbody during telophase. Overexpression of Rabkinesin-6 causes a cell division defect resulting in cell death. Microinjection of anti-rabkinesin-6 antibodies results in binucleate cells with a defect in cleavage furrow formation and thus cytokinesis (EMBO J, 2000, 19, 5711-9). Rabkinesin-6 was shown to be one of 5 novel cytokine-responsive genes identified from endothelial cells activated by monocyte-conditioned medium or tumor necrosis factor alpha (Blood 1999, 93, 3418-31).

[0338] 44252 is a critical kinesin involved in cleavage furrow formation in telophase. Upregulation of 44252 in tumors would be indicative of a greater mitotic index and would be expected to promote progression through cytokinesis. Much of the literature shows expression of 44252 in endothelial cells, indicating a key role in angiogenesis. Inhibition of 44252 would be expected to prevent endothelial cell proliferation in support of tumor vascularization. In addition, tumors that express 44252 would have their cell cycle progression significantly slowed.

[0339] Due to 44252 function and expression, modulators of 44252 activity would be useful in treating human cancers, including but not limited to tumor angiogenesis, breast and ovarian cancers. 44252 polypeptides of the present invention are useful in screening for modulators of 44252 activity.

[0340] Gene ID 14184

[0341] The human 14184 sequence (SEQ ID NO:15), also known as serine/threonine protein kinase EMK, is approximately 2946 nucleotides long including untranslated regions. The coding sequence, located at about nucleic acids 408 to 2645 of SEQ ID NO:15, encodes a 745 amino acid protein (SEQ ID NO:16).

[0342] Transcriptional profiling identified increased 14184 mRNA expression in a panel of lung tumors versus normal lung samples. As assessed by TaqMan analysis, 14184 mRNA expression was broad in normal tissues, with the highest expression in pancreas and central nervous system tissues. TaqMan analysis indicated that 14184 mRNA was upregulated in lung, breast and ovarian tumors. Further TaqMan analyses indicated a decrease in 14184 mRNA expression in NCI-H125 cells (p53 mutant) in which wild-type p53 has been reintroduced.

[0343] The drosophila homologue (Par-1) of the protein encoded by 14184 was recently shown to be a signaling component of the wnt pathway (Nature Cell Bio 2001;3:628-636), which is thought to play a role in solid tumor development and progression. Specifically, Par-1 potentiates B-catenin signaling while at the same time inhibiting the JNK pathway. Perturbation of this pathway by overexpression of 14184 would be expected to contribute to tumorigenesis by driving abnormal wnt signaling.

[0344] Due to 14184 function and expression, modulators of 14184 activity would be useful in treating human cancers, including but not limited to breast, ovarian and lung cancers. 14184 polypeptides of the present invention are useful in screening for modulators of 14184 activity.

[0345] Gene ID 42461

[0346] The human 42461 sequence (SEQ ID NO:17), also known as helicase-like transcription factor (HLTF); SWI/SNF related, matrix associated, actin dependent regulator of chromatin, subfamily a, member 3; or ATPase, DNA-binding protein (HIP116), is approximately 5457 nucleotides long including untranslated regions. The coding sequence, located at about nucleic acids 313 to 3342 of SEQ ID NO:17, encodes a 1009 amino acid protein (SEQ ID NO:18).

[0347] Transcriptional profiling identified increased 42461 mRNA expression in a subset of lung tumors (>2× in 10/21 tumors) versus normal lung samples. As assessed by TaqMan analysis, 42461 mRNA was upregulated in 6/6 lung tumors and in 2/6 breast tumors as compared to their respective normal tissue samples. Further TaqMan analysis on an expanded panel indicated 42461 mRNA was upregulated in 18/35 lung tumor samples as compared to normal lung tissue samples. Additional analysis showed decreased 42461 mRNA expression in NCI-H125 cells (p53 mutant) in which wild-type p53 has been reintroduced.

[0348] In situ hybridization experiments conducted on 42461 showed that primary lung tumors are positive for 42461 (6/7 tumor samples vs. 0/2 normal lung tissue samples). No expression was seen in normal lung epithelial cells.

[0349] 42461 (HLTF) is a member of the SWI/SNF family of chromatin remodeling proteins that play a role in transcriptional activation and repression. While a number of family members, including HLTF, have been implicated as tumor suppressors, the emerging picture appears to be much more complex. Brg1, which appears to function with the Rb protein in tumor suppression, has been shown to have increased levels of expression in advanced gastric carcinomas. It is also critical for the survival and proliferation of F9 carcinoma cells suggesting that, like many chromatin regulators, its role in the cell extends beyond a tumor suppressor function. Overexpression of 42461 in tumor cells may disrupt a critical balance required for controlled chromosome maintenance and predispose cells towards a tumorigenic phenotype.

[0350] Due to 42461 function and expression, modulators of 42461 activity would be useful in treating human cancers, including but not limited to breast and lung cancers. 42461 polypeptides of the present invention are useful in screening for modulators of 42461 activity.

[0351] Gene ID 8204

[0352] The human 8204 sequence (SEQ ID NO:19), known also as adenine phosphoribosyltransferase (APRT), is approximately 841 nucleotides long including untranslated regions. The coding sequence, located at about nucleic acids 72 to 614 of SEQ ID NO:19, encodes a 180 amino acid protein (SEQ ID NO:20).

[0353] As assessed by TaqMan analysis, 8204 mRNA was expressed at higher levels in colon and lung tumors (single sample pool of 3 tumors) with respect to normal colon and lung pools, respectively. 8204 mRNA was also highly expressed in coronary smooth muscle cells (SMC), human umbilical vein endothelial cells (HUVECs) and erythroid cells.

[0354] Further TaqMan analysis on oncology tissue panels indicated that 8204 mRNA was expressed at increased levels in 5/6 breast, in 3/6 lung, and in 4/5 colon tumors when compared to their respective normal tissue samples (3/3 breast, 3/3 lung, 3/3 colon). 8204 mRNA was also expressed at increased levels in proliferating human microvascular endothelial cells (HMVECs) relative to arrested HMVECs.

[0355] TaqMan analyses performed using an angiogenesis panel (fetal vs. adult tissues) indicated that 8204 mRNA was expressed at increased levels in fetal liver (2/2), in adrenal (2/2), in kidney (2/2) and in heart (1/1) relative to adult angiogenic tissue samples (31/34), including adult heart (7/7). TaqMan analysis using an additional angiogenesis panel (hemangiomas and necrotic and angiogenic tumors) indicated that 8204 mRNA was expressed at higher levels in 2/8 hemangiomas relative to 1/1 normal skin tissue samples. 8204 mRNA was also expressed at higher levels in necrotic tumors (1/4 breast, 3/3 colon, and 3/3 lung tumors).

[0356] In an expanded lung tumor panel, TaqMan analyses indicated that 8204 mRNA was increased in 15/33 lung tumors when compared to 6/6 normal lung tissue samples. Increased expression of 8204 mRNA was particularly noted in lung SCC (7/10).

[0357] In a colon ACA tumor panel, TaqMan analyses indicated that 8204 mRNA was increased in 2/15 colon primary tumors when compared to 6/6 normal colon tissue samples and 3/5 colon tumor metastasis samples when compared to either 6/6 normal colon tissue samples or 6/6 normal liver tissue samples. In a colon tumor metastasis panel, TaqMan analysis indicated that 8204 mRNA was increased in 4/4 colon primary tumors when compared to 3/3 normal colon tissue samples and in 14/16 samples of colon tumor metastasis to the liver when compared to either 3/3 normal colon tissue samples or 3/3 normal liver tissue samples. 8204 mRNA expression was also increased in 7/14 samples of colon tumor metastasis to other sites when compared to 3/3 normal colon tissue samples.

[0358] In an expanded breast tumor panel, TaqMan analysis indicated that 8204 mRNA was increased in 1/15 breast primary tumors when compared to 4/4 normal breast tissue samples or in 11/15 breast primary tumors when compared to 2/4 normal breast tissue samples. Breast metastases (4/5) had increased mRNA levels of 8204 when compared to their normal tissue sample controls (5/5).

[0359] TaqMan analysis of 8204 mRNA expression in an “endothelial cell in vitro proliferation, arrest and tube formation” panel indicated increased expression in proliferating HUVEC (1/1) and lung HMVEC (3/3) when compared to arrested HUVEC (1/1) and lung HMVEC (3/3).

[0360] Based on the TaqMan data, tissues from primary lung, colon, and colon metastases to the liver as well as several angiogenic tissues were used in in situ hybridization experiments. Expression of 8204 was confirmed in each of these tumors types by ISH. Normal lung and normal colon were modestly positive by ISH, confirming the TaqMan data.

[0361] Deficiency of the enzyme adenine phosphoribosyltransferase (APRT) has been associated with hypersensitivity to the mutagenic effects of ethyl methanesulfonate and 254 nm ultraviolet radiation in clone 707 of Friend mouse erythroleukemia (FEL) cells. The mutagen hypersensitivity of APRT-deficient cells may be the result of decreased efficiency in the excision repair processes due to reduced levels of ATP (Br J Biomed Sci 1997, 54, 174-80).

[0362] Cancer cells upregulate DNA repair pathways to compensate for a lack of checkpoint controls within the cell cycle. Maintenance of ATP levels within the cells is important to maintain efficiency of excision repair processes. Inhibition of 8204 would target cancer cells by preventing this compensation mechanism.

[0363] Due to 8204 function and expression, modulators of 8204 activity would be useful in treating human cancers, including but not limited to breast, colon and lung cancers, and tumor angiogenesis. 8204 polypeptides of the present invention are useful in screening for modulators of 8204 activity.

[0364] Gene ID 7970

[0365] The human 7970 sequence (SEQ ID NO:21), known also as AAA ATPase, is approximately 1748 nucleotides long including untranslated regions. The coding sequence, located at about nucleic acid 79 to 1164 of SEQ ID NO:21, encodes a 361 amino acid protein (SEQ ID NO:22).

[0366] As assessed by TaqMan analysis, 7970 mRNA showed low to moderate expression in a broad range of tissues. 7970 mRNA showed highest expression in tissues of the central nervous system and in the heart. Clinical samples showed an increased expression of 7970 mRNA in 6/7 lung tumors, 2/6 breast tumors, 2/6 primary colon tumors, and 2/4 colon metastases as compared to the normal controls.

[0367] In situ hybridization experiments indicated that 7970 mRNA expression was increased in the epithelium of lung tumor samples (4/5) versus normal controls.

[0368] AAA Atpases constitute a large family of proteins with a wide array of functions, including membrane trafficking, transcriptional regulation, proteolysis, cytoskeletal regulation, and cell cycle control. Overexpression of 7970 in tumor epithelium confers a selective growth advantage on these cells. Therefore, inhibition of 7970 in tumor cells would lead to growth arrest and an eventual reduction in tumor size. Due to 7970 mRNA expression in lung, breast and primary colon tumors, along with its functional role, modulators of 7970 activity would be useful in treating human cancers. 7970 polypeptides of the present invention are useful in screening for modulators of 7970 activity.

[0369] Gene ID 25552

[0370] The human 25552 sequence (SEQ ID NO:23), known also as a methyltransferase, is approximately 1529 nucleotides long including untranslated regions. The coding sequence, located at about nucleic acid 57 to 980 of SEQ ID NO:23, encodes a 307 amino acid protein (SEQ ID NO:24).

[0371] As assessed by TaqMan analysis, 25552 mRNA showed ubiquitous expression in colon tumor when compared to normal colon tissues. Further TaqMan experiments indicated that 25552 mRNA showed elevated expression in 2/8 Breast, in 3/9 Ovary, in 8/8 Lung, 5/8 Colon, and in 3/4 metastases tissues.

[0372] In situ hybridization experiments indicated that 25552 mRNA was expressed in 4/8 primary colon tumors and in 3/3 metastases tissues.

[0373] Dysregulated expression of 25552 is potentially protecting cancer cells from undergoing cell death. Due to 25552 mRNA expression in breast, lung and colon tumors, along with its functional role, modulators of 25552 activity would be useful in treating human cancers. 25552 polypeptides of the present invention are useful in screening for modulators of 25552 activity.

[0374] Gene ID 21657

[0375] The human 21657 sequence (SEQ ID NO:25), known also as short-chain dehydrogenase/reductase, is approximately 1249 nucleotides long including untranslated regions. The coding sequence, located at about nucleic acid 53 to 1006 of SEQ ID NO:25, encodes a 317 amino acid protein (SEQ ID NO:26).

[0376] As assessed by TaqMan analysis, 21657 mRNA showed broad expression in normal tissues, with highest expression in the pancreas and ovary. Further TaqMan experiments indicated that 21657 mRNA expression was increased in 2/6 breast tumors and in 2/7 lung tumors relative to their normal controls.

[0377] In situ hybridization experiments indicated that 21657 mRNA was expressed in the tumor epithelium of 4/5 primary colon tumors and of 4/4 colon metastases tissues. Lung and breast tissues showed modest expression of 21657 mRNA that was equivalent to the normal controls.

[0378] Members of the short-chain dehydrogenase/reductase (SDR) family function in the metabolism of retinoid and steroid hormones, both of which have been demonstrated to have dramatic effects on tumor cell growth. Therefore, overexpression of 21657 affects hormone homeostasis in tumor cells, conferring a selective growth advantage on those cells. Due to 21657 mRNA expression in breast and lung tumors, along with its functional role, modulators of 21657 activity would be useful in treating human cancers. 21657 polypeptides of the present invention are useful in screening for modulators of 21657 activity.

[0379] Gene ID 26492

[0380] The human 26492 sequence (SEQ ID NO:27), known also as Diphosphoinositol polyphosphate phosphohydrolase (DIPP), is approximately 4396 nucleotides long including untranslated regions. The coding sequence, located at about nucleic acid 148 to 534 of SEQ ID NO:27, encodes a 128 amino acid protein (SEQ ID NO:28).

[0381] As assessed by TaqMan analysis, 26492 mRNA was expressed in the heart, skeletal muscle, and kidney. 26492 mRNA also showed increased expression in 4/8 lung tumor samples, in 3/8 breast tumor samples, in 3/8 primary colon tumors, and in 2/4 liver metastases when compared with normal control tissues.

[0382] In situ hybridization experiments indicated specific expression of 26492 mRNA in the tumor epithelium of 5/5 lung tumors, of 3/3 colon tumors, and of 1/1 breast tumors.

[0383] DIPP family members dephosphorylate diphosphoinositol polyphosphates and act as molecular switches in the cell. Among the processes controlled by these molecules are intracellular trafficking, DNA repair, and apoptosis. It was recently demonstrated in an ovarian tumor cell lines that PP-InsP5 is involved in induction of apoptosis. Therefore, overexpression of 26492 would expect to reduce the levels of PP-InsP5 in the cell.

[0384] Reduced PP-InsP5 in the cell results in resistance to apoptosis, which is a hallmark phenotype of tumor cells. Due to 26492 mRNA expression in lung, breast and primary colon tumors, along with its functional role, modulators of 26492 activity would be useful in treating human cancers. 26492 polypeptides of the present invention are useful in screening for modulators of 26492 activity.

[0385] Gene ID 2411

[0386] The human 2411 sequence (SEQ ID NO:29), known also as G-protein coupled receptor, is approximately 1382 nucleotides long including untranslated regions. The coding sequence, located at about nucleic acid 61 to 1284 of SEQ ID NO:29, encodes a 407 amino acid protein (SEQ ID NO:30).

[0387] As assessed by TaqMan analysis, 2411 mRNA expression was increased 46 fold in pooled lung tumors relative to the pooled normal lung and increased 2 fold in pooled breast tumors relative to normal breast. 2411 mRNA was expressed at high levels in coronary smooth muscle cells, HUVEC, brain cortex, dorsal root ganglia, ovary, prostate and pancreas.

[0388] In oncology TaqMan panels, 2411 mRNA expression was increased in 4/6 lung tumors (5 to 25 fold) relative to 3 normal lung samples, and approximately 15 fold in 2 colon liver metastases relative to normal liver.

[0389] In expanded colon tumor panels, 2411 mRNA was expressed at increased levels in 6/6 colon liver metastases (5 to 18 fold) relative to 5 normal liver samples. In expanded colon liver metastases panels, 2411 mRNA was expressed at increased levels in 10/17 colon liver metastases (3 to 20 fold) relative to 3 normal liver samples.

[0390] 2411 mRNA was also detected in 2/3 colon tumors, in 1/1 colon polyps and in 3/3 colon liver metastases by in situ hybridiztion. 2411 mRNA was detected in 2/3 lung tumors, but not in 1/1 normal lung tissues. 2411 mRNA expression was increased in some colon liver metastases and lung tumors relative to normal liver and lung, respectively.

[0391] 2411 encodes an unnamed G-protein coupled receptor, a family of receptors involved in the regulation of diverse cellular functions, including growth, differentiation and apoptosis (Oncogene 2001; 20:1530-31). Many activated forms of G-protein coupled receptors are known to transform cells by initiating constitutive oncogenic signaling. Therefore, selective inhibition of 2411 in cancers expressing high levels of this gene may disrupt these oncogenic signaling networks, resulting in an inhibition and/or reduction in tumor growth. Due to 2411 mRNA expression in lung, breast, colon and liver tumors, along with its functional role, modulators of 2411 activity would be useful in treating human cancers. 2411 polypeptides of the present invention are useful in screening for modulators of 2411 activity.

[0392] Gene ID 15088

[0393] The human 15088 sequence (SEQ ID NO:31), known also as a unnamed protein product, is approximately 3492 nucleotides long including untranslated regions. The coding sequence, located at about nucleic acid 104 to 3007 of SEQ ID NO:31, encodes a 967 amino acid protein (SEQ ID NO:32).

[0394] As assessed by TaqMan analysis, 15088 mRNA was expressed at high levels in pooled colon tumor when compared to normal colon tissues. In addition, 15088 mRNA expression was increased 25 fold in the pooled ovary tumors relative to the pooled normal ovaries. 15088 mRNA was expressed at moderately high levels in artery, diseased aorta, heart, pituitary gland, spinal cord and hypothalamus.

[0395] In oncology TaqMan panels, 15088 mRNA expression was increased in 3/4 colon tumors (3 to 9 fold) relative to 3 normal colons, in 5/6 ovary tumors (4 to 27 fold) relative to 3 normal ovaries, and in 4/6 lung tumors (3 to 6 fold) relative to 3 normal lungs.

[0396] In expanded colon tumor panels, 15088 mRNA was expressed at increased levels in 3/15 colon tumors (2 to 6 fold) and in 2/7 colon metastases (2.5 and 4 fold) relative to 6 normal colons. 15088 mRNA was also expressed at low levels in 6 normal livers. In expanded colon metastases panels, 15088 mRNA was expressed at increased levels in 4/4 colon tumors (2 to 23 fold) and in 13/17 colon to liver metastases (3 to 50 fold) relative to 2 normal colons. 15088 mRNA was also expressed at low levels in 3 normal livers.

[0397] In expanded ovary tumor panels, 15088 mRNA was expressed at increased levels in 10/12 ovary tumors and in 1/1 ovary to lung metastases (4 to 65 fold) relative to 4 normal ovaries.

[0398] In situ hybridization experiments detected 15088 mRNA in 3/5 colon tumors, in 4/5 colon metastases, and in 3/6 ovary tumors.

[0399] 15088 encodes an unnamed G-protein coupled receptor, a family of receptors involved in the regulation of diverse cellular functions, including growth, differentiation and apoptosis (Oncogene 2001; 20:1530-31). Expression of some activated forms of G-protein coupled receptors are known to transform cells by initiating constitutive oncogenic signaling. Therefore, selective inhibition of 15088 in cancers expressing high levels of this gene may disrupt these oncogenic signaling networks, resulting in an inhibition and/or reduction in tumor growth. Due to 15088 mRNA expression in ovary, colon, lung and liver tumors, along with its functional role, modulators of 15088 activity would be useful in treating human cancers. 15088 polypeptides of the present invention are useful in screening for modulators of 15088 activity.

[0400] Gene ID 1905

[0401] The human 1905 sequence (SEQ ID NO:33), known also as GPCR-rhodopsin, is approximately 1342 nucleotides long including untranslated regions. The coding sequence, located at about nucleic acid 179 to 1180 of SEQ ID NO:33, encodes a 333 amino acid protein (SEQ ID NO:34).

[0402] As assessed by TaqMan analysis, 1905 mRNA expression was highest in brain cortex, lymph node, tonsil, liver fibrosis, spleen, lung cancer and skeletal muscle. 1905 mRNA was higher in colon and lung tumors (single sample pool of 3 tissue isolates) when compared to expression in normal colon and lung (single sample pool of 3 tissue samples).

[0403] Further TaqMan analyses on oncology tissue panels indicated that 1905 mRNA was expressed at increased levels in 6/8 breast, in 4/5 ovary, in 6/6 lung and in 6/6 colon tumors when compared to their respective normal tissue samples (3/3 breast, 2/2 ovary, 3/3 lung, 3/3 colon).

[0404] On a TaqMan colon panel, 1905 mRNA was expressed at increased levels in 6/15 colon tumors when compared to normal colon (5/6). 1905 mRNA was also increased in 5/6 colon metastases to the liver relative to normal liver (6/6) or normal colon (5/6). TaqMan analysis on a colon metastasis panel demonstrated that 1905 mRNA was increased in colon tumors (3/4) relative to normal colon (3/3). 1905 mRNA was also increased in colon metastasis to the liver (14/17) when compared to either normal colon (3/3) or normal liver (3/3).

[0405] In situ hybridization experiments confirmed that 1905 mRNA was elevated in colon tumors, including 2/2 adenomas, 1/1 dysplastic tissue, 1/3 tumors, and 5/6 colon metastases relative to 3/3 normal colon and 3/3 normal liver.

[0406] Chemokines represent a large family of polypeptide signaling molecules that are notable for their role in chemotaxis, leukocyte homing, directional migration, and GPCR activation. Chemokines have recently been implicated in tumor progression and metastasis (J Invest Dermatol 2002, 118, 915-22). GPCR stimulation induces proliferation and prevents apoptosis of hormone independent prostate cancer cells, indicating their role in the progression of prostate cancer (J Urol 2002, 167, 1458-63).

[0407] 1905 is involved in tumor progression and metastasis by promoting proliferation, cell survival, and cell migration. Due to 1905 mRNA expression in lung, breast and colon tumors, along with its functional role, modulators of 1905 activity would be useful in treating human cancers. 1905 polypeptides of the present invention are useful in screening for modulators of 1905 activity.

[0408] Gene ID 28899

[0409] The human 28899 sequence (SEQ ID NO:35), known also as 1-acyl-sn-glycerol-3-phosphate acyltransferase, is approximately 1832 nucleotides long including untranslated regions. The coding sequence, located at about nucleic acid 192 to 1322 of SEQ ID NO:35, encodes a 376 amino acid protein (SEQ ID NO:36).

[0410] As assessed by TaqMan analysis, 28899 mRNA was expressed at 4-68 fold increased levels in 6/6 primary breast tumor samples when compared to 2/3 normal breast samples; at 3-83 fold increased levels in 5/7 primary lung tumor samples when compared to 3/3 normal lung samples; and at 2-23 fold increased levels in 4/4 primary colon tumor samples when compared to 2/3 normal colon samples. 28899 mRNA was expressed at a 22-fold increased level in the primary breast tumor pool when compared to the normal breast tissue pool, at a 15-fold increased level in the primary colon tumor pool when compared to the normal colon tissue pool, and at a 466-fold increased level in the primary lung tumor pool when compared to the normal lung tissue pool. Other tissue samples which express 28899 include tissues from the central nervous system, kidney and heart. 28899 mRNA was also expressed in many ovarian cancer cell lines, including SKOV3, A2780, OVCAR3, MDA2774 and ES-2.

[0411] In situ hybridization experiments indicated that 28899 mRNA was expressed in ovary, colon and breast tumors.

[0412] LPA acyltransferase, is the enzyme in lipid metabolism which converts lysophosphatidic acid (LPA) to phosphatidic acid (PA). LPA and PA are potent mitogens for various cell types which function through EDG family and ras pathway, respectively. In addition, LPA and PA can induce the chemotactic migration in endothelial cells. It has been shown that overexpression of LPA acyltransferase in A549 lung epithelial carcinoma and ECV304 endothelial cells results in a significant increase of cytokine expression. High levels of 28899 expression in tumors results in increased intracellular levels of phosphatidic acid, which in turn drives tumor cell proliferation, and possibly invasion. Due to 28899 mRNA expression in breast, lung and colon tumors, along with its functional role, modulators of 28889 activity would be useful in treating human cancers. 28899 polypeptides of the present invention are useful in screening for modulators of 28899 activity.

[0413] Gene ID 63380

[0414] The human 63380 sequence (SEQ ID NO:37), known also as delta7-delta8 sterol isomerase, is approximately 931 nucleotides long including untranslated regions. The coding sequence, located at about nucleic acid 53 to 673 of SEQ ID NO:37, encodes a 206 amino acid protein (SEQ ID NO:38).

[0415] As assessed by TaqMan analysis, 63380 mRNA was expressed at 4->100 fold increased levels in 4/4 primary colon tumor samples when compared to 3/3 normal colon samples; at 5-14 fold increased levels in 2/2 colon liver metastases samples when compared to 1/1 normal liver sample; and at 2-31 fold increased levels in 3/6 primary lung tumor samples when compared to 3/3 normal lung samples. 63380 mRNA was expressed at a 6-fold increased level in the primary colon tumor pool when compared to the normal colon tissue pool, and at a 4-fold increased level in the primary lung tumor pool when compared to the normal lung tissue pool. Other tissues which express 63380 at high levels include erythroid cells, pancreas and brain. 63380 mRNA was also expressed in many ovarian cancer cell lines, including A2780, OVCAR3, HEY, MDA2774 and ES-2.

[0416] Emopamil-binding protein (EBP), also known as sterol isomerase, is an integral membrane protein of the endoplasmic reticulum. It is a high affinity binding protein for the antiischemic phenylalkylamine Ca2+ antagonist [3H]emopamil and the photoaffinity label [3H]azidopamil. EBP is similar to sigma receptors and may be a member of a superfamily of high affinity drug-binding proteins in the endoplasmic reticulum of different tissues. EBP shares structural features with bacterial and eukaryontic drug transporting proteins. It has four putative transmembrane segments and contains two conserved glutamate residues which may be involved in the transport of cationic amphiphilics. Another prominent feature of EBP is its high content of aromatic amino acid residues (>23%) in its transmembrane segments. These aromatic amino acid residues are involved in the drug transport by the P-glycoprotein. Mutations in EBP cause Chondrodysplasia punctata 2 (CDPX2; also known as Conradi-Hunermann syndrome).

[0417] 63380 is potentially an endoplasmic reticulum membrane enzyme involved in sterol biosynthesis. Inhibition of 63380 is predicted to inhibit tumor growth. Due to 63380 mRNA expression in lung and colon tumors, along with its functional role, modulators of 63380 activity would be useful in treating human cancers. 63380 polypeptides of the present invention are useful in screening for modulators of 63380 activity.

[0418] Gene ID 33935

[0419] The human 33935 sequence (SEQ ID NO:39), known also as Glycosyl Transferase I, is approximately 2590 nucleotides long including untranslated regions. The coding sequence, located at about nucleic acid 11 to 1489 of SEQ ID NO:39, encodes a 492 amino acid protein (SEQ ID NO:40).

[0420] As assessed by TaqMan analysis, 33935 mRNA expression was at very low to moderate levels in a broad range of tissues. Highest expression of 33935 mRNA was seen in the brain cortex. Increased 33935 mRNA expression levels was observed in 6/7 lung tumors, in 2/6 breast tumors, in 2/6 primary colon tumors, and in 2/4 colon metastases as compared to the normal controls.

[0421] In situ hybridization experiments indicated that 33935 mRNA expression levels were increased in the epithelium of lung tumor samples (4/5) versus normal controls.

[0422] 33935 is a member of the glycosyltransferase I family. Members of this family transfer UDP, ADP, GDP or CMP linked sugars to a variety of substrates, including glycogen, fructose-6-phosphate and lipopolysaccharides. A change in the structure of glycans added to glycoproteins and glycolipids is a common feature of the change to malignancy. Increased expression of 33935 in tumor cells results in the increased glycosylation of key substrates that control cell growth, survival, and invasive capacity. This in turn contributes to the malignant cellular phenotype observed in tumors. Due to 33935 mRNA expression in lung, breast and colon tumors, along with its functional role, modulators of 33935 activity would be useful in treating human cancers. 33935 polypeptides of the present invention are useful in screening for modulators of 33935 activity.

[0423] Gene ID 10480

[0424] The human 10480 sequence (SEQ ID NO:41), known also as CoA transferase, is approximately 3337 nucleotides long including untranslated regions. The coding sequence, located at about nucleic acid 99 to 1661 of SEQ ID NO:41, encodes a 520 amino acid protein (SEQ ID NO:42).

[0425] As assessed by TaqMan analysis, 10480 mRNA showed broad, variable expression, with highest normal expression in brain cortex and erythroid cells. 10480 mRNA showed increased expression in 6/6 lung tumors when compared to normal control tissues.

[0426] In situ hybridization experiments showed low to high expression of 10480 mRNA in the tumor epithelium of 4/5 lung samples and of 4/6 breast samples.

[0427] Reduction of 10480 expression in tumor cells by transfection with siRNA oligos specific for 10480 resulted in cell growth inhibition. RNAi studies in 3 different cell lines (A549, HT29, and HCT116) showed levels of growth inhibition upon 10480 expression reduction comparable to those seen in a PLK1 positive control.

[0428] Succinyl-CoA:3-ketoacid-CoA transferase (SCOT) functions as the first step in catabolism of ketone bodies that are formed by β-oxidation of fatty acids. A number of lines of evidence from profiling experiments point to increased use of fatty acids as an energy source by tumor cells, which results in higher levels of ketone bodies within these cells. SCOT is potentially increased in tumor cells as a mechanism for metabolizing ketone bodies, which can be detrimental to cells at high concentrations. Due to 10480 mRNA expression in lung tumors, along with its functional role, modulators of 10480 activity would be useful in treating human cancers. Small molecule inhibitors of 10480 would be expected to have an effect similar to that seen with RNAi on tumor cell growth, and are therefore attractive cancer therapeutic candidates. 10480 polypeptides of the present invention are useful in screening for modulators of 10480 activity.

[0429] Gene ID 12686

[0430] The human 12686 sequence (SEQ ID NO:43), known also as DEAD-type helicases, is approximately 1864 nucleotides long including untranslated regions. The coding sequence, located at about nucleic acid 67 to 1518 of SEQ ID NO:43, encodes a 483 amino acid protein (SEQ ID NO:44).

[0431] As assessed by TaqMan analysis, 12686 mRNA expression was highest in HUVEC, skeletal muscle, pancreas, brain cortex, and erythroid cell samples. 12686 mRNA expression was highest in colon and lung tumors (single sample pool of 3 tissue isolates) when compared to expression in normal colon and lung samples (single sample pool of 3 tissue samples).

[0432] Further TaqMan analyses on oncology tissue panels indicated that 12686 mRNA was expressed at increased levels in 3/6 breast, in 3/6 ovary, in 6/6 lung and in 4/5 colon tumors when compared to their respective normal tissue samples (3/3 breast, 3/3 ovary, 3/3 lung, 3/3 colon). In addition, 12686 mRNA was expressed at higher levels in proliferating HMVEC when compared to arrested HMVEC.

[0433] TaqMan analysis using an angiogenesis panel indicated that 12686 mRNA was highly expressed in fetal tissues including liver (1/2), adrenal (2/2), kidney (2/2), and heart (1/1) samples relative to adult angiogenic tissue samples (4/4). Also, TaqMan analysis using another angiogenesis panel also indicated that 12686 mRNA was expressed at higher levels in 1/6 hemangiomas relative to 2/2 normal skin tissue samples. 12686 mRNA was also expressed at higher levels in necrotic tumors (2/2 lung and 1/1 breast tumors) relative to their normal controls (1/1 lung and 1/1 breast). 12686 mRNA was expressed at higher levels in Wilm's tumor (3/3) relative to the normal control (kidney (1/1) and other kidney tumors (3/3)). TaqMan analysis on the EC/PAT panel also demonstrated that 12686 mRNA was upregulated in proliferating lung HMVEC (1/1) or HUVEC (2/2) relative to their arrested controls (lung HMVEC (1/1) or HUVEC (2/2)).

[0434] 12686 is a nucleolar helicase involved in the biogenesis of the 40S ribosomal subunits. Inhibition of 12686 would lead to a depletion of active 80S ribosome, resulting in a reduction of protein synthesis within the cell. Due to 12686 mRNA expression in lung, breast, ovary and colon tumors, along with its functional role, modulators of 12686 activity would be useful in treating human cancers. 12686 polypeptides of the present invention are useful in screening for modulators of 12686 activity.

[0435] Gene ID 25501

[0436] The human 25501 sequence (SEQ ID NO:45), known also as SAM-dependent methyltransferase, is approximately 1971 nucleotides long including untranslated regions. The coding sequence, located at about nucleic acid 16 to 1527 of SEQ ID NO:45, encodes a 503 amino acid protein (SEQ ID NO:46).

[0437] As assessed by TaqMan analysis, 25501 mRNA expression was highest in brain cortex, glial cells, and ovarian, prostate, and colon tumors. 25501 mRNA expression was higher in ovarian and colon tumors (single sample pool of 3 tissue isolates) when compared to expression in normal ovarian and colon tissue samples (single sample pool of 3 tissue samples).

[0438] Further TaqMan analysis on oncology tissue panels indicated that 25501 mRNA was expressed at increased levels in 2/6 breast, in 2/5 ovary, in 8/8 lung and in 4/6 colon tumors when compared to their respective normal tissue samples (3/3 breast, 2/2 ovary, 3/3 lung, 3/3 colon). In addition, 25501 mRNA was expressed at higher levels in proliferating HMVEC when compared to arrested HMVEC.

[0439] TaqMan analysis using an angiogenesis panel indicated that 25501 mRNA was highly expressed in fetal tissues (3/3) relative to adult tissue samples (2/3), especially fetal heart (1/1) relative to adult heart (1/1). Further TaqMan analysis using another angiogenesis panel indicated that 25501 mRNA was expressed at higher levels in 2/3 hemangiomas relative to 1/1 normal skin tissue samples. 25501 mRNA was also expressed at higher levels in Wilm's tumor (2/2) relative to the normal control (kidney (1/1)) and other kidney tumors (1/1).

[0440] On a colon TaqMan panel, 25501 mRNA was expressed at increased levels in 14/15 colon tumors when compared to normal colon (4/6). 25501 mRNA expression was also increased in 6/6 colon metastases to the liver relative to normal liver (6/6) or normal colon (4/6).

[0441] TaqMan analysis on the EC panels also demonstrated that 25501 mRNA was upregulated in proliferating lung HMVEC (2/2), cardiac HMVEC (2/2) or HUVEC (2/2) relative to their arrested controls (lung HMVEC (2/2), cardiac HMVEC (2/2) or HUVEC (2/2)).

[0442] In situ hybridization experiments confirmed the TaqMan results by demonstrating that 25501 mRNA upregulation was tumor specific in lung, colon, and in the angiogenic Wilm's tumor and fetal adrenal, but no change was found in breast tumors from the already high expression in normal epithelium.

[0443] 25501 is a member of the UPF0020 family, indicative of a putative RNA methylase activity. Inhibition of 25501 may have an impact on protein translation. Due to 25501 mRNA expression in lung, colon, breast, and ovary tumors, along with its functional role, modulators of 25501 activity would be useful in treating human cancers. 25501 polypeptides of the present invention are useful in screening for modulators of 25501 activity.

[0444] Gene ID 17694

[0445] The human 17694 sequence (SEQ ID NO:47), known also as a methionyl-tRNA synthetase, is approximately 2800 nucleotides long including untranslated regions. The coding sequence, located at about nucleic acid 24 to 2726 of SEQ ID NO:47, encodes a 900 amino acid protein (SEQ ID NO:48).

[0446] As assessed by TaqMan analysis, 17694 mRNA expression was increased 10.5 fold in a pooled colon tumor sample relative to a pooled normal colon sample. 17694 mRNA expression was also elevated 7.5 fold in a pooled lung tumor sampl relative to a pooled normal lung sample. Other tissues expressing high 17694 mRNA expression levels included HUVEC cells, heart, primary osteoblasts, pituitary gland, brain cortex and erythroid cells.

[0447] In oncology TaqMan panels, 17694 mRNA expression was increased in 3/5 breast tumors (2.5 to 7 fold) relative to 3 normal breast samples, in 4/6 lung tumors (3 to 7 fold) relative to 3 normal lung samples, and in 2/4 colon tumors (2 and 4 fold) relative to 3 normal colon samples. 17694 mRNA was also expressed at high levels in the human colorectal carcinoma cell line HCT116.

[0448] In colon metastasis TaqMan panels, 17694 mRNA expression was increased in 2/4 colon tumors (2.5 to 3.5 fold) and in 8/16 colon to liver metastases (2 to 12 fold) relative to 3 normal colon samples. 17694 mRNA was expressed at very high levels in normal liver.

[0449] In expanded lung tumor TaqMan panels, 17694 mRNA expression was increased in 6/33 lung tumors (2 to 5 fold) relative to 5 normal lungs and 1 normal lung trachea.

[0450] 17694 expression was detected at low levels in 3/3 normal lungs by in situ hybridization. However, 17694 was detected at significantly higher levels in 2/3 lung adenocarcinomas, in 2/2 squamous cell carcinomas and in 1/2 poorly differentiated non-small cell carcinomas.

[0451] 17694 encodes a methionyl-tRNA synthetase, a member of the aminoacyl-tRNA synthetases. This family of enzymes ligates amino acids to their cognate tRNAs which are subsequently used as substrates in peptide elongation during protein translation (Acta Biochimica Polonica (2001); 48(2):337-50). Methionyl-tRNA synthetase ligates the amino acid methionine to tRNA (Gene (1996); 178:187-9). In addition to their role in peptide elongation, aminoacyl-tRNA synthetases participate in translational fidelity, RNA processing and transcriptional/translational regulation. In addition, methionyl-tRNA synthetase is thought to participate in formation of rRNA in nucleoli (The Journal of Cell Biology (2000); 149(3):567-74).

[0452] Because 17694 expression is increased in some cancers, and because it plays a role in several essential processes associated with cell growth regulation, 17694 mRNA is an ideal target for anti-cancer drug design. Selective inhibition of 17694 results in inhibition and/or reduction of tumor growth. Due to 17694 mRNA expression in lung, colon and liver tumors, along with its functional role, modulators of 17694 activity would be useful in treating human cancers. 17694 polypeptides of the present invention are useful in screening for modulators of 17694 activity.

[0453] Gene ID 15701

[0454] The human 15701 sequence (SEQ ID NO:49), known also as Kinesin-lilke protein KIF14, is approximately 6586 nucleotides long including untranslated regions. The coding sequence, located at about nucleic acid 440 to 5386 of SEQ ID NO:49, encodes a 1648 amino acid protein (SEQ ID NO:50).

[0455] As assessed by TaqMan analysis, expression of 15701 mRNA expression was fairly restricted to epithelial tumors. 15701 mRNA was expressed at a 5-fold increased level in the breast tumor pool when compared to normal breast tissue pool, at a 10-fold increased level in the ovary tumor pool when compared to the normal ovary tissue pool, and at a 5-fold increased level in the primary colon tumor pool when compared to the normal colon tissue pool 15701 mRNA was also expressed in the lung tumor pool, while it is not expressed in the normal lung tissue pool. Other samples expressing 15701 mRNA include erythroid cells, HUVEC cells and primary osteoblasts.

[0456] In an oncology TaqMan tissue panel, 15701 mRNA was expressed at increased levels (10-154 fold) in 3/5 primary breast tumors when compared to 3/3 normal breast tissue samples. 15701 mRNA was expressed at increased levels (3-20 fold) in 5/6 primary ovary tumor samples when compared to 2/3 normal ovary samples. 15701 mRNA was expressed at detectable levels in 5/6 primary lung tumors, however 15701 expression is not detected in 3/3 normal lung tissue samples. 15701 mRNA was expressed at 4-fold increased levels in proliferating HMVEC cells when compared to arrested HMVEC cells.

[0457] In an expanded breast cancer tissue panel, 15701 mRNA was expressed at increased levels (2-131 fold) in 14/15 primary breast tumor samples when compared to 4/4 normal breast tissue samples. In a breast cancer cell model panel, 15701 mRNA was expressed at a 4-fold increased level in transformed, activated H-ras-expressing MCF10AT01 cells vs. normal MCF10A cells, and at a 5-fold increased level in transformed, activated H-ras-expressing MCF10AT3B cells when compared to normal MCF10A cells. 15701 mRNA was expressed in many breast tumor cell lines, including MCF-7, T47D, ZR-75 and MDA-MB-468. In the PI3-kinase panel, 15701 mRNA expression was decreased in MDA-MB-468, MCF-7 and LNCaP cells after 48 hours treatment with the PI3-kinase inhibitor LY294002. 15701 mRNA expression in MDA-MB-468 cells decreased 7-fold after 48 hours with LY294002 (115 uM). 15701 mRNA expression in MCF-7 cells decreased 16-fold after 48 hours with LY294002 (30 uM). 15701 mRNA expression in LNCaP cells was completely undetectable after 48 hours with LY294002 (30 uM).

[0458] 15701 is the kinesin-like protein KIF14. Kinesin superfamily proteins (KIFs) have been shown to transport organelles, protein complexes and mRNAs to specific destinations in a microtubule and ATP-dependent manner. Additionally, some kinesins participate in chromosomal and spindle movements during mitosis and meiosis. 45 KIFs have been identified in humans, with many conserved in other species. 15701 is a kinesin protein that is expressed at increased levels in many epithelial tumors and may be involved in chromosome segregation during mitosis. Inhibiting 15701 is predicted to lead to a variety of mitotic defects, ultimately leading to cell death. Due to 15701 mRNA expression in lung, colon and liver tumors, along with its functional role, modulators of 15701 activity would be useful in treating human cancers. 15701 polypeptides of the present invention are useful in screening for modulators of 15701 activity.

[0459] Gene ID 53062

[0460] The human 53062 sequence (SEQ ID NO:51), known also as ser-thr protein kinase related to the myotonic dystrophy protein kinase, is approximately 5373 nucleotides long including untranslated regions. The coding sequence, located at about nucleic acid 1 to 4719 of SEQ ID NO:51, encodes a 1572 amino acid protein (SEQ ID NO:52).

[0461] As assessed by TaqMan analysis, 53062 mRNA was expressed at a 20-fold increased level in the lung tumor pool when compared to the normal lung tissue pool; at a 9-fold increased level in the primary colon tumor pool when compared to the normal colon tissue pool; and at a 2-fold increased level in the ovary tumor pool when compared to the normal ovary tissue pool. 53062 mRNA was expressed at a 2-fold increased level in the lung tumor pool when compared to the normal lung tissue pool; at a 3-fold increased level in the primary colon tumor pool when compared to the normal colon tissue pool; and at a 3-fold increased level in the ovary tumor pool when compared to the normal ovary tissue pool.

[0462] In oncology tissue TaqMan panels, 53062 mRNA was expressed at increased levels (3-17 fold) in 5/6 primary ovary tumor samples when compared to 3/3 normal ovary samples. 53062 mRNA was expressed at increased levels (3-37 fold) in 6/6 primary lung tumor samples when compared to 2/2 normal lung tissue samples. 53062 mRNA expression was increased 12-fold in a pooled colon liver metastases sample when compared to a normal liver samples.

[0463] In an expanded lung cancer tissue panel, 53062 mRNA was expressed at increased levels (2-27 fold) in 15/33 primary lung tumor samples when compared to 6/6 normal lung tissue samples.

[0464] In an expanded colon cancer tissue panel, 53062 mRNA was expressed at increased levels (7-72 fold) in 4/4 colon liver metastases samples when compared to 4/4 normal liver tissue samples.

[0465] In expanded breast cancer tissue panels, 53062 mRNA was expressed at increased levels (2-54 fold) in 11/15 primary breast tumor samples when compared to 2/4 normal breast tissue samples, however the remaining 2/4 normal breast tissue samples are the highest expressing samples on this panel.

[0466] In an oncology xenograft cell line panel, 53062 mRNA was expressed in several tumor cell lines, including DLD-1, NCI-H69, NCI-H322 and MCF-7.

[0467] 53062 is the human kinase polypeptide (PKIN-20) cDNA. This kinase has mouse and rat putative orthologs. 53062 is 42% identical to human myotonic dystrophy protein kinase (DMPK, Q09013). Decreased expression of DMPK leads to the disease myotonic dystrophy, an inherited disorder in which the muscles contract but have decreasing power to relax. With this condition, the muscles also become weak and waste away. Myotonic dystrophy can cause mental deficiency, hair loss and cataracts. 53062 is not expressed in skeletal muscle and is therefore likely to have a divergent role from DMPK. 53062 is a protein kinase of unknown function with increased expression levels in 50% of primary lung cancers. Inhibition of 53062 may inhibit tumor progression. Due to 53062 mRNA expression in lung, colon, breast and ovary tumors, along with its functional role, modulators of 53062 activity would be useful in treating human cancers. 53062 polypeptides of the present invention are useful in screening for modulators of 53062 activity.

[0468] Gene ID 49908

[0469] The human 49908 sequence (SEQ ID NO:53), known also as DEAD/DEXH helicase DDX31, is approximately 3286 nucleotides long including untranslated regions. The coding sequence, located at about nucleic acid 154 to 2709 of SEQ ID NO:53, encodes a 851 amino acid protein (SEQ ID NO:54).

[0470] As assessed by TaqMan analysis, 49908 mRNA expression was increased 14 fold in pooled colon tumors relative to pooled normal colons. 49908 mRNA expression was also elevated 3 fold in pooled lung tumors relative to pooled normal lung. Other tissues expressing high 49908 mRNA levels included brain cortex and HUVEC.

[0471] In oncology TaqMan panels, 49908 mRNA expression was increased in 2/4 colon tumors (5 and 5.5 fold) relative to 3 normal colon samples and in 4/6 lung tumors (5 to 9 fold) relative to 3 normal lung samples. 49908 mRNA was also expressed at high levels in the human colorectal carcinoma cell line HCT116. In SVA colon polyp panels, 49908 mRNA expression was increased in 3/4 adenomas (2 to 3.7 fold), and in 1/5 adenocarcinomas (4.8 fold) relative to 5 normal colon samples.

[0472] In expanded colon tumor panels, there was a single outlying normal colon sample expressing moderately high 49908 levels. Omitting that sample 49908 mRNA was expressed at increased levels in 7/15 colon tumors (2 to 3.5 fold) and in 3/4 colon to liver metastases (2 to 4 fold) relative to 6 normal colon samples. 49908 mRNA was expressed at moderate levels in normal liver.

[0473] In expanded lung tumor panels, 49908 mRNA expression was increased in 10/33 lung tumors (2 to 14 fold) relative to 4 normal lung and in 1 normal lung trachea. The tumors expressing increased 49908 mRNA comprised mainly squamous cell carcinomas (8/10). 49908 mRNA was expressed at moderate levels in normal skin.

[0474] 49908 encodes the DEAD/DEXH helicase DDX31, a member of the RNA helicase family. RNA helicases are characterized by 8 conserved motifs. Variations in motif II allow the RNA helicases to be classified into groups, such as DEAD, DEAH or DExH (Nature Structural Biology; (2000) 7(2):97-99). 49908 contains the conserved amino acid sequence Asp-Glu-Ala-Asp at motif II, and is therefore considered a DEAD-box RNA helicase. RNA helicases are implicated in several cellular processes involving RNA secondary structure; including transcription, pre-mRNA processing, ribosome biogenesis, RNA export, translational initiation, mitochondrial gene expression and RNA degradation. Other DEAD-box family members have been implicated in growth regulation and tumor initiation/progression as they have been found to be overexpressed in various cancers (Oncogene (2001) 20:7734-43; and The Journal of Biological Chemistry (1998) 273(33):21161-68). For example, the DEAD-box protein rck/p54 was found to be overexpressed in the majority of colorectal tumors examined. rck/p54 overexpression was implicated in increasing levels of the oncogenic protein c-Myc by enhancement of its translation efficiency and/or stabilization of its mRNA (Carcinogenesis (2001) 22(12):1965-70).

[0475] 49908 expression is increased in colon and lung cancers, and because 49908 plays a role in several essential processes associated with cell growth regulation, it is an ideal target for anti-cancer drug design. Selective inhibition of 49908 potentially results in inhibition and/or reduction of tumor growth. Due to 49908 mRNA expression in lung and colon tumors, along with its functional role, modulators of 49908 activity would be useful in treating human cancers. 49908 polypeptides of the present invention are useful in screening for modulators of 49908 activity.

[0476] Gene ID 21612

[0477] The human 21612 sequence (SEQ ID NO:55), known also as SDR (short-chain dehydrogenase/reductases), is approximately 2535 nucleotides long including untranslated regions. The coding sequence, located at about nucleic acid 762 to 2018 of SEQ ID NO:55, encodes a 418 amino acid protein (SEQ ID NO:56).

[0478] As assessed by TaqMan analysis, 21612 mRNA expression was increased 4 fold in the pooled colon tumors relative to the pooled normal colons. 21612 mRNA expression was also elevated 5 fold in pooled lung tumors relative to pooled normal lungs. 21612 mRNA was expressed at high levels in diseased heart, skeletal muscle, brain cortex, ovary and prostate epithelial cells.

[0479] In oncology TaqMan panels, 21612 mRNA expression was increased in 6/7 lung tumors (2 to 5 fold) relative to 3 normal lung samples, and in 3/4 colon tumors (2 to 3 fold) relative to 3 normal colon samples.

[0480] In situ hybrization experiments indicated that 21612 mRNA was detected in 0/3 normal colons, in 1/1 hyperplastic/dysplastic colons, in 2/5 colon adenocarcinomas, in 0/1 colon metastases to the liver and in 0/3 normal livers. 21612 mRNA was detected in 1/3 lung tumors, but not in 1/1 normal lung tissues.

[0481] 21612 encodes an unnamed short-chain dehydrogenase/reductase, a heterogenous superfamily of enzymes. In humans, 37 members were identified that fall into three functional classes; enzymes involved in intermediary metabolism, enzymes participating in lipid hormone metabolism, and enzymes with unknown functions (Chemico-Biological Interactions (2001) 130-2: 699-705). 21612 expression is increased in some colon and lung tumors relative to the respective normal tissue. Some of these family members have been associated with increased risk of ovarian and breast cancer. Selective inhibition of 21617 results in an inhibition and/or reduction in tumor growth. Due to 21612 mRNA expression in lung and colon tumors, along with its functional role, modulators of 21612 activity would be useful in treating human cancers. 21617 polypeptides of the present invention are useful in screening for modulators of 21617 activity.

[0482] Gene ID 38949

[0483] The human 38949 sequence (SEQ ID NO:57), known also as abhydrolase (alpha/beta hydrolases), is approximately 1298 nucleotides long including untranslated regions. The coding sequence, located at about nucleic acid 78 to 1166 of SEQ ID NO:57, encodes a 362 amino acid protein (SEQ ID NO:58).

[0484] As assessed by TaqMan analysis, 38949 mRNA was expressed at moderate levels in normal brain cortex, hypothalamus and to a lesser extent in normal ovary. In oncology TaqMan panels, 38949 mRNA was expressed in 1/1 colon to liver metastases samples.

[0485] In expanded colon panels, 38949 mRNA was expressed in 3/5 colon to liver metastases. In expanded colon metastases panels, 38949 mRNA was expressed in 2/4 colon tumors and in 8/16 colon to liver metastases.

[0486] In situ hybridization experiments idicated that 38949 mRNA was detected at low levels in 1/3 colon adenocarcinomas and in 2/4 colon to liver metastases, but not in 3 normal colon or 2 normal liver samples.

[0487] 38949 encodes an unknown alpha/beta hydrolase of unknown function. The alpha/beta hydrolase fold is common to a number of hydrolytic enzymes of widely differing phylogenetic origin and catalytic function (Protein Eng 1992;5(3):197-211). 38949 expression is increased in some colon to liver metastases. The specificity of 38949 to colon to liver metastases may make it an ideal target for inhibiting colon metastases. Due to 38949 mRNA expression in colon tumors, along with its functional role, modulators of 38949 activity would be useful in treating human cancers. 38949 polypeptides of the present invention are useful in screening for modulators of 38949 activity.

[0488] Gene ID 6216

[0489] The human 6216 sequence (SEQ ID NO:59), known also as Propionyl-CoA carboxylase alpha subunit, is approximately 2423 nucleotides long including untranslated regions. The coding sequence, located at about nucleic acid 49 to 2160 of SEQ ID NO:59, encodes a 703 amino acid protein (SEQ ID NO:60).

[0490] As assessed by TaqMan analysis, 6216 mRNA expression was increased 100 fold in the pooled colon tumors relative to the pooled normal colons. 6216 mRNA expression was also elevated 2-3 fold in pooled ovarian, prostate and lung tumors relative to pooled normal tissue. 6216 mRNA was expressed at high levels in heart, kidney, adrenal gland and brain cortex.

[0491] In oncology TaqMan panels, 6216 mRNA expression was increased in 2/4 colon tumors (5 and 17 fold) relative to 3 normal colon samples, and in 2/6 lung tumors (3 and 42 fold) relative to 3 normal lung samples.

[0492] In expanded colon tumor panels, 6216 mRNA was expressed at increased levels in 3/12 colon tumors (2 to 3.5 fold) and in 2/5 colon metastases to the liver (5 and 6 fold) relative to 5 normal colon samples.

[0493] 6216 mRNA was detected in 5/6 colon tumors, in 1/1 colon polyps and in 5/5 colon metastases by in situ hybridiztion. 6216 mRNA was not detected in 3 normal colons, but was detected in 2 normal livers. 6216 mRNA was detected in 2/5 lung tumors, but not in 2 normal lungs.

[0494] 6216 encodes propionyl-CoA carboxylase alpha, one of two subunits that make up propionyl-CoA carboxylase, a biotin-dependent mitochondrial enzyme involved in the catabolism of branched chain amino acids, odd-numbered chain length fatty acids, cholesterol, and other metobolites (Human Mutation (1999) 14:275-82). The involvement of carboxylation reactions in the metabolism of short chain fatty acids is the main source of energy for human colonic cells (Int J Cancer (1997) 72:768-75). This may explain upregulation of this gene in some rapidly proliferating colon tumors. 6216 expression is increased in some colon and lung tumors relative to the respective normal tissue. Therefore, selective inhibition of 6216 may adversely affect metabolism in cancer cells, resulting in an inhibition and/or reduction in tumor growth. Due to 6216 mRNA expression in colon and lung tumors, along with its functional role, modulators of 6216 activity would be useful in treating human cancers. 6216 polypeptides of the present invention are useful in screening for modulators of 6216 activity.

[0495] Gene ID 46863

[0496] The human 46863 sequence (SEQ ID NO:61), known also as ANM (arginine N-methyltransferase), is approximately 2864 nucleotides long including untranslated regions. The coding sequence, located at about nucleic acid 141 to 2678 of SEQ ID NO:61, encodes a 845 amino acid protein (SEQ ID NO:62).

[0497] As assessed by TaqMan analysis, 46863 mRNA expression was increased 8 fold in pooled lung tumors relative to the pooled normal lung and 8 fold in pooled colon tumors relative to pooled normal colon. 46863 mRNA was expressed at moderately high levels in arteries, veins, coronary smooth muscle cells, HUVEC, heart, kidney, skeletal muscle, adrenal gland and erythroid cells.

[0498] In oncology TaqMan panels, 46863 mRNA expression was increased in 4/6 lung tumors (2 to 7 fold) relative to 3 normal lung samples, and in 4/4 colon tumors and in 1/2 colon to liver metastases (2.5 to 7 fold) relative to 3 normal colon samples and 1 normal liver sample.

[0499] 46863 mRNA was detected in 1/5 colon tumors, in 1/1 hyperplastic colons and in 2/6 colon to liver metastases by in situ hybridization. 46863 mRNA was detected in 1/3 lung tumors but not in 1 normal lung sample by in situ hybridization.

[0500] 46863 encodes an unnamed arginine N-methyltransferase. Arginine methylation is a common protein posttranslational modification suspected to regulate protein subcellular localization, protein-protein interactions and transcriptional activity. 46863 expression is increased in some colon and lung tumors relative to normal colon and lung, respectively. Selective inhibition of 46863 in cancers expressing high levels of 46863 disrupts the activity of proteins associated with various oncogenic signaling networks, resulting in an inhibition and/or reduction in tumor growth. Due to 46863 mRNA expression in lung and colon tumors, along with its functional role, modulators of 46863 activity would be useful in treating human cancers. 46863 polypeptides of the present invention are useful in screening for modulators of 46863 activity.

[0501] Gene ID 9235

[0502] The human 9235 sequence (SEQ ID NO:63), known also as Glutamine-fructose-6-phosphate transaminase, is approximately 3082 nucleotides long including untranslated regions. The coding sequence, located at about nucleic acid 123 to 2168 of SEQ ID NO:63, encodes a 681 amino acid protein (SEQ ID NO:64).

[0503] As assessed by TaqMan analysis, 9235 mRNA expression was increased in 3/5 breast tumors (2 to 15 fold) relative to 3 normal breast samples, and in 5/6 lung tumors (15 to 38 fold) relative to 3 normal lungs.

[0504] In expanded colon tumor panels, there was a single outlying normal colon sample expressing moderately high 9235 mRNA levels. Omitting that sample, 9235 expression was increased in 8/15 colon tumors (2 to 4 fold) and in 4/4 colon to liver metastases (2 to 4 fold) relative to 5 normal colon samples. 9235 mRNA was expressed at low levels in normal liver. In colon metastases panels, 9235 mRNA expression was increased in 2/4 colon tumors (2 to 3 fold) and in 9/16 colon metastases (2 to 13 fold) relative to 2 normal colon samples. 9235 mRNA was expressed at low levels in normal liver.

[0505] 9235 mRNA was detected in 1/3 normal colons, in 0/2 normal jejunum, in 5/6 colon adenocarcinomas, and in 4/4 colon metastases to the liver by in situ hybridization. 9235 mRNA was detected in 2/3 lung tumors, but not in 2/2 normal lungs.

[0506] 9235 encodes glututamine-fructose-6-phosphate transaminase. 9235 converts 2-5% of fructose-6 phosphate derived from glucose to glucosamine-6-phosphate using glutamine as an amide donor (Endocrinology (1995) 136(7):2809-16; and Biochimica et Biophysica Acta (2002) 1597:173-92). Glucosamine-6-phosphate is then transformed to uridine diphosphate-N acetylglucosamine (UDP-GlcNAc), a substrate used for N- and O-linked protein glycosylation. 9235 expression is increased in some breast, lung and colon tumors relative to the respective normal tissue. The membrane-spanning and ECM molecules expressed by tumors often differ quantitatively and qualitatively from the cell or tissue from which they are derived and these differences play a critical role in tumor initiation and progression. Therefore, changes in glutamine-fructose-6-phosphate transaminase activity in cancer may be critical in the synthesis of tumor-associated cell surface molecules. Selective inhibition of 9235 may alter the gylcocaylx of cancer cells, resulting in an inhibition and/or reduction in tumor growth. Due to 9235 mRNA expression in colon and lung tumors, along with its functional role, modulators of 9235 activity would be useful in treating human cancers. 9235 polypeptides of the present invention are useful in screening for modulators of 9235 activity.

[0507] Gene ID 2201

[0508] The human 2201 sequence (SEQ ID NO:65), known also as mixed lineage kinase (MLK), is approximately 2455 nucleotides long including untranslated regions. The coding sequence, located at about nucleic acids 1 to 2403 of SEQ ID NO:65, encodes an 800 amino acid protein (SEQ ID NO:66).

[0509] As assessed by TaqMan analysis, 2201 mRNA was expressed at increased levels (2 fold) in colon tumor samples vs. normal colon samples (15 fold) and in lung tumor samples vs. normal lung samples.

[0510] In an additional TaqMan panel, 2201 mRNA was expressed at increased levels in primary breast tumor samples (2.5-81 fold), in lung tumor samples (2-19 fold) and in primary colon cancer samples (3-49 fold) when compared to their respective control samples. 2201 is expressed at 1′-fold increased levels in proliferating human microvascular endothelial cells (HMVECs) when compared to arrested HMVECs.

[0511] In an expanded cancer tissue panel, 2201 mRNA is expressed at increased levels in primary colon tumor samples (2-148 fold), in primary breast tumor samples (3-15 fold) and in primary lung tumor samples (2-985 fold) when compared to their respective control samples.

[0512] In a PI3Kinase panel, 2201 mRNA expression is reduced 4-24 fold after 24 hours of treatment with approximately 8× the EC50 of phosphotidylinositol 3-kinase in LNCaP (30 uM), MDA-MB468 (115 uM), MCF 7 Tet-Off (30 uM) and NCI-H125 (150 uM) cancer cell lines.

[0513] In a breast cancer cell model panel, 2201 is increased 3-fold after an 8 hour treatment of MCF10A cells with 10 ng/ml EGF.

[0514] Mixed linkage kinases have been proposed to function as mitogen-activated protein kinase kinase kinases in pathways leading to MAPK cascade. MLKs may have a pivotal role in cell growth regulation. The expression of ZAK, a mixed linkage kinase, in mammalian cells specifically leads to the activation of the JNK/SAPK pathway as well as the activation of the transcription factor, NF-kappa B. Overexpression of the ZAK gene induces the apoptosis of a hepatoma cell line. (Biochem Biophys Res Commun 2000, Aug 11; 274 (3): 811-6).

[0515] Due to 2201 function and expression, modulators of 2201 activity would be useful in treating human cancers, including but not limited to colon and lung cancers, and tumor angiogenesis. 2201 polypeptides of the present invention are useful in screening for modulators of 2201 activity.

[0516] Gene ID 6985

[0517] The human 6985 sequence (SEQ ID NO:67), known also as carnitine O-palmitoyltransferase I, mitochondrial muscle isoform (CPTM) (CPTI), is approximately 2565 nucleotides long including untranslated regions. The coding sequence, located at about nucleic acids 20 to 2338 of SEQ ID NO:67, encodes a 772 amino acid protein (SEQ ID NO:68).

[0518] As assessed by TaqMan analysis on an oncology tissue panel, 6985 was expressed at 5-fold increased levels in the ovarian tumor pool vs. the normal ovary tissue pool and 3-fold increased levels in the colon tumor pool vs. the normal colon tissue pool. Other tissue samples in which 6985 mRNA expression levels were shown to be over-expressed include heart, skeletal muscle and brain.

[0519] In another oncology tissue panel, 6985 is expressed at 4-226 fold increased levels in 5/5 primary ovary tumor samples vs. 3/3 normal ovary samples, at 9-189 fold increased levels in 5/6 primary lung tumor samples vs. 3/3 normal lung samples, and at 12-138 fold increased levels in 2/4 primary colon tumor samples vs. 3/3 normal colon samples.

[0520] In an ovary cell model panel, 6985 is expressed in many ovarian cancer cell lines, including A2780 and OVCAR3.

[0521] 6985 is a component of the carnitine system, responsible for facilitating entry of long-chain fatty acids into mitochondria for their utilization in energy-generating processes. Overexpression of 6985 in ovarian and lung tumors suggests a unique requirement for the activity of this enzyme in these cancers. Inhibition of 6985 is predicted to inhibit tumor progression.

[0522] Due to 6985 function and expression, modulators of 6985 activity would be useful in treating human cancers, including but not limited to colon, ovarian and lung cancers. 6985 polypeptides of the present invention are useful in screening for modulators of 6985 activity.

[0523] Gene ID 9883

[0524] The human 9883 sequence (SEQ ID NO:69), known also as iduronate-2-sulfatase precursor, is approximately 2297 nucleotides long including untranslated regions. The coding sequence, located at about nucleic acids 125 to 1777 of SEQ ID NO:69, encodes an 550 amino acid protein (SEQ ID NO:70).

[0525] As assessed by TaqMan analysis, 9883 mRNA expression was highest in artery, pituitary gland, brain cortex, brain hypothalamus, and dorsal root ganglion. 9883 mRNA expression was higher in ovarian, colon, and lung tumors (single sample pool of 3 tissue isolates) when compared to expression in normal ovarian, colon, and lung (single sample pool of 3 tissue samples).

[0526] Further TaqMan analyses on oncology tissue panels indicated that 9883 mRNA was expressed at increased levels in breast, lung and colon tumors when compared to their respective normal tissue samples. In addition, 9883 mRNA was expressed at higher levels in proliferating human microvascular endothelial cells (HMVEC) when compared to arrested HMVEC.

[0527] TaqMan analysis using an angiogenesis panel indicated that 9883 mRNA was highly expressed in fetal heart tissue relative to adult heart tissue samples. 9883 mRNA was also expressed at higher levels in Wilm's tumor and other kidney tumors relative to the normal kidney control. 9883 mRNA expression was high in angiogenic tumors and was expressed at increased levels in lung tumors and breast tumors relative to normal controls.

[0528] TaqMan analysis on the EC/PAT panel also demonstrated that 9883 mRNA was upregulated in tube formation for lung HMVEC and human umbilical vein endothelial cells (HUVEC) relative to their arrested or proliferating controls.

[0529] L-Iduronate rich glycosaminoglycans regulate the activity of growth factors and the ability of tumor cells to metastasize. The degree of sulfation is critical to at least some of the function of the L-iduronate rich glycosaminoglycans. Upregulation of 9883 is seen in tube formation TaqMan panel, consistent with a migratory/invasion role for 9883 in endothelial cells. Inhibition of 9883 would result in a decrease in metastasis in tumors reliant on these interactions.

[0530] Due to 9883 function and expression, modulators of 9883 activity would be useful in treating human cancers, including but not limited to breast, ovarian, colon and lung cancers, and tumor angiogenesis. 9883 polypeptides of the present invention are useful in screening for modulators of 9883 activity.

[0531] Gene ID 12238

[0532] The human 12238 sequence (SEQ ID NO:71), known also as activated p21cdc42Hs kinase, is approximately 4548 nucleotides long including untranslated regions. The coding sequence, located at about nucleic acids 451 to 3729 of SEQ ID NO:71, encodes an 1092 amino acid protein (SEQ ID NO:72).

[0533] As assessed by TaqMan analysis, 12238 mRNA expression levels were elevated in colon and lung tumors (single sample pool of 3 tumors) with respect to normal colon and lung (single sample pool of 3 tissue samples). 12238 mRNA was also highly expressed in brain cortex, pituitary, hypothalamus, skeletal muscle, and erythroid cells (single sample pool of 3 tissue samples).

[0534] Further TaqMan analysis on an oncology tissue panels indicated that 12238 mRNA was expressed at increased levels in 1/5 breast, in 2/6 ovarian, in 5/6 lung, and in 4/5 colon tumors when compared to their respective normal tissue samples (3/3 breast, 3/3 ovary, 3/3 lung, 3/3 colon). 12238 mRNA was expressed at increased levels in proliferating HMVEC relative to arrested HMVEC.

[0535] TaqMan analysis using an angiogenesis panel (fetal vs. adult tissues) indicated that 12238 mRNA was expressed at increased levels in fetal liver (2/2), in kidney (2/2), in heart (1/1), and in umbilical cord (1/2) relative to adult angiogenic tissue samples (29/34).

[0536] TaqMan analysis using another angiogenesis panel (hemangiomas and necrotic and angiogenic tumors) indicated that 12238 mRNA was expressed at higher levels in 3/8 hemangiomas relative to 1/1 normal skin tissue samples. 12238 was also expressed at higher levels in necrotic tumors (2/3 breast, 3/3 colon, and 3/3 lung tumors) when compared with normal controls (1/1 breast, 1/1 colon, and 1/1 lung)

[0537] In an expanded lung tumor panel, TaqMan analysis indicated that 12238 mRNA was increased in 17/33 lung tumors when compared to 6/6 normal lung tissue samples.

[0538] In a colon ACA tumor panel, TaqMan analysis indicated that 12238 mRNA was increased in 4/15 colon primary tumors when compared to 6/6 normal colon tissue samples and in 1/5 colon tumor metastasis samples when compared to either 6/6 normal colon tissue samples or 6/6 normal liver tissue samples.

[0539] In an expanded breast tumor panel, TaqMan analysis indicated that 12238 mRNA was increased in 2/15 breast primary tumors when compared to 4/4 normal breast tissue samples or in 15/15 breast primary tumors when compared to 2/4 normal breast tissue samples. Breast metastases (2/5) had increased 12238 mRNA levels when compared to their normal tissue sample controls (5/5).

[0540] TaqMan analysis of 12238 mRNA expression in the “endothelial cell in vitro proliferation, arrest and tube formation” panel indicated increased expression in lung HMVEC (2/3) when compared to lung HMVEC (3/3). High expression of 12238 mRNA was also seen late in tube formation (16 h) with HUVEC (1/1) grown on matrigel relative to early time points (2 & 6 h) and controls grown on plastic (proliferating & arrested HUVEC).

[0541] In situ experiments performed on 12238 show expression of 12238 in lung and colon primary tumors, as well as in a number of angiogenic tissues. The experiments showed some variation in the number of positive samples. However, the specimens that are positive show clearly that this gene is expressed in tumor cells.

[0542] Cdc42 regulates signaling pathways that control cell morphology, migration, endocytosis, and cell cycle progression. Overexpression of the cdc42-binding domain of ACK1 completely reversed v-Ha-Ras-induced malignant phenotypes such as focus formation and anchorage/serum-independent growth of NIH3T3 cells (Oncogene 1999, 18, 7787-93). Melanoma chondroitin sulfate proteoglycan (MCSP) is a cell-surface antigen that has been implicated in the growth and invasion of melanoma tumors. MCSP-induced spreading of melanoma cells is dependent upon active cdc42, ACK1 and tyrosine phosphorylation of p130cas (Nat Cell Biol 1999, 1, 507-13). ACK1 phosphorylates and activates the guanine nucleotide exchange factor Dbl, which in turn directs the Rho family GTP-binding proteins. ACK1 acts as a mediator of EGF signals to Rho family GTP-binding proteins through the phosphorylation and activation of GEFs such as Dbl (Biochem Biophys Res Commun 2001, 284, 470-7). Accumulation of the GTP-bound form of Rho and Rac within the cell paralleled ACK1-dependent tyrosine phosphorylation of Dbl. ACK1 may act as a regulator of Dbl, which in turn activates Rho family proteins (Biochem Biophys Res Commun 2000, 268, 141-7). GEF activity of Ras-GRF1 toward Ha-Ras was augmented after tyrosine phosphorylation by ACK1 (J Biol Chem 2000, 275, 29788-93).

[0543] 12238 mediates the role of cdc42 in cell morphology, migration, endocytosis, and cell cycle progression. 12238 phosphorylates and activates Rho family GEFs, including Dbl and Ras-GRF1. 12238 activity induces increases in Rho-GTP and Rac-GTP. Inhibition of 12238 would reverse transformation of cells in which 12238 is activated, resulting in tumor regression.

[0544] Due to 12238 function and expression, modulators of 12238 activity would be useful in treating human cancers, including but not limited to colon and lung cancers, and tumor angiogenesis. 12238 polypeptides of the present invention are useful in screening for modulators of 12238 activity.

[0545] Gene ID 18057

[0546] The human 18057 sequence (SEQ ID NO:73), an uncharacterized protein, is approximately 1859 nucleotides long including untranslated regions. The coding sequence, located at about nucleic acids 218 to 1627 of SEQ ID NO:73, encodes an 469 amino acid protein (SEQ ID NO:74).

[0547] In a TaqMan panel, 18057 mRNA was expressed at increased levels in pooled colon tumors (5 fold) relative to pooled normal colon and in pooled breast tumors (3 fold) relative to pooled normal breast. 18057 mRNA was also expressed in pooled lung tumors, but not at all in pooled normal lung. 18057 mRNA was expressed at moderately high levels in kidney, brain, cortex and hypothalamus.

[0548] In an oncology TaqMan panel, 18057 mRNA expression was increased in colon to liver metastases (4.5 and 5 fold) relative to normal colons. 18057 mRNA was not detected in normal liver. 18057 mRNA expression was also increased in breast tumors (2 and 4 fold) relative to normal breasts and in ovary tumors (3.5 to 9 fold) relative normal ovaries. 18057 mRNA was expressed in lung tumors at relatively moderate to high levels, but was not expressed in normal lungs.

[0549] 18057 mRNA expression is increased in some colon, breast, ovary and lung tumors. 18057 encodes an unnamed G-protein coupled receptor, a family of receptors involved in the regulation of diverse cellular functions, including growth, differentiation and apoptosis (Oncogene 2001; 20:1530-31). Expression of some activated forms of G-protein coupled receptors is known to transform cells by initiating constitutive oncogenic signaling (Oncogene 2001; 20:147-55). Therefore, selective inhibition of 18057 in cancers expressing high levels of this gene may disrupt these oncogenic signaling networks, resulting in an inhibition and/or reduction in tumor growth.

[0550] Due to 18057 function and expression, modulators of 18057 activity would be useful in treating human cancers, including but not limited to breast, ovarian, colon and lung cancers. 18057 polypeptides of the present invention are useful in screening for modulators of 18057 activity.

[0551] Gene ID 21617

[0552] The human 21617 sequence (SEQ ID NO:75), known also as retinol dehydrogenase 10, is approximately 3624 nucleotides long including untranslated regions. The coding sequence, located at about nucleic acids 339 to 1364 of SEQ ID NO:75, encodes an 341 amino acid protein (SEQ ID NO:76).

[0553] In a TaqMan panel, 21617 mRNA expression was increased 10 fold in pooled breast tumors relative to the pooled normal breast, 8 fold in pooled colon tumors relative to pooled normal colon and over 100 fold in pooled lung tumors relative to pooled normal lung. 21617 mRNA is expressed at moderately high levels in kidney, spinal cord and nerve.

[0554] In an oncology TaqMan panel, 21617 mRNA expression was increased in breast tumors, lung tumors, colon tumors and colon to liver metastases. 21617 mRNA was not detected in normal breast, normal lung samples and normal colon samples.

[0555] In an expanded colon tumor panel, 21617 mRNA was expressed at increased levels in colon tumors (7 to 23 fold) relative to normal colon samples.

[0556] In an expanded colon liver metastases panel, 21617 mRNA was expressed at increased levels in colon tumors (2 to 6 fold) relative to normal colon samples. 21617 mRNA expression was also increased in colon to liver metastases (2 to 20 fold) relative to normal liver samples.

[0557] In situ hybridization showed 21617 mRNA was detected in colon tumors, colon to liver metastases, breast tumors and lung tumors. 21617 mRNA was also detected in normal liver samples, but to a lesser extent than the colon to liver metastases. 21617 was not detected in normal colon, normal breast or normal lung samples.

[0558] 21617 mRNA expression is increased in some colon, breast and lung tumors relative to the respective normal tissue. 21617 encodes retinol dehydrogenase 10 (Invest Ophthalmol Vis Sci 2002; 43(11):3365-72), a member of short-chain dehydrogenase/reductase, a heterogenous superfamily of enzymes. In humans, 37 members were identified that fall into three functional classes; enzymes involved in intermediary metabolism, enzymes participating in lipid hormone metabolism, and enzymes with unknown functions (Chemico-Biological Interactions 2001; 130-2:699-705). Some of these family members have been associated with increased cancer risk. Selective inhibition of 21617 may result in an inhibition and/or reduction in tumor growth.

[0559] Due to 21617 function and expression, modulators of 21617 activity would be useful in treating human cancers, including but not limited to breast, colon and lung cancers. 21617 polypeptides of the present invention are useful in screening for modulators of 21617 activity.

[0560] Gene ID 39228

[0561] The human 39228 sequence (SEQ ID NO:77), known also as similar to NADPH oxidoreductase homolog, is approximately 1808 nucleotides long including untranslated regions. The coding sequence, located at about nucleic acids 285 to 1418 of SEQ ID NO:77, encodes an 377 amino acid protein (SEQ ID NO:78).

[0562] As assessed by TaqMan analysis, 39228 mRNA expression was highest in HUVEC, heart (congestive heart failure), skeletal muscle, brain cortex and lung tumor tissue samples. 39228 mRNA expression was higher in ovarian, colon, and lung tumors (single sample pool of 3 tissue isolates) when compared to expression in normal ovarian, colon, and lung (single sample pool of 3 tissue samples).

[0563] Further TaqMan analysis on oncology tissue panels indicated that 39228 mRNA was expressed at increased levels in 1/6 breast, in 1/5 ovary, in 5/5 lung and in 6/6 colon tumors when compared to their respective normal tissue samples (3/3 breast, 2/2 ovary, 3/3 lung, 2/2 colon). In addition, 39228 mRNA was expressed at higher levels in proliferating HMVEC when compared to arrested HMVEC.

[0564] TaqMan analysis using an angiogenesis panel indicated that 39228 mRNA was highly expressed in fetal kidney (2/2) and in heart (1/1) tissues relative to adult kidney (1/1) and heart (1/1) tissue samples. TaqMan analysis using another angiogenesis panel indicated that 39228 mRNA was highly expressed in a skin tumor sample (1/1). 39228 mRNA was also expressed at higher levels in Wilm's tumor (5/5) and other kidney tumors (1/1) relative to the normal control (kidney (1/1)).

[0565] TaqMan analysis on the EC panels also demonstrated that 39228 mRNA was upregulated in proliferating lung HMVEC (4/4), cardiac HMVEC (3/3) or HUVEC (4/4) relative to their arrested controls (lung HMVEC (4/4), cardiac HMVEC (3/3) or HUVEC (4/4)).

[0566] TaqMan analysis of the Cox inhibitor study indicates that 39228 mRNA expression is increased by treatment of HUVEC with 40-100 mM NS398 (a Cox2 selective inhibitor) or Sulindac for 10 h relative to a vehicle (DMSO) control.

[0567] In situ hybridization experiments conducted on 39228 confirms the TaqMan data in that ovary tumors are positive for this gene. Colon tumors as well as colon metastases, breast tumors, and lung tumors are all positive. Normal colon tissue and normal ovary are negative. Normal lung and normal breast tissue are slightly positive as are these tissues when measured by TaqMan. Normal liver is also slightly positive.

[0568] 39228 is most closely related to the leukotriene B4 12-hydroxydehydrogenase subfamily of zinc alcohol dehydrogenases. Antagonists of the leukotriene B4 receptor have been shown to inhibit proliferation and induce apoptosis in pancreatic cancer cells (Clin Cancer Res 2002, 8, 323242). 39228 was discovered using a Cox inhibitor paradigm, consistent with its homology to leukotriene metabolic enzymes. 39228 will inhibit proliferation and induce apoptosis by dysregulating leukotriene-like signaling.

[0569] Due to 39228 function and expression, modulators of 39228 activity would be useful in treating human cancers, including but not limited to breast, ovarian, colon and lung cancers, and tumor angiogenesis. 39228 polypeptides of the present invention are useful in screening for modulators of 39228 activity.

[0570] Gene ID 49928

[0571] The human 49928 sequence (SEQ ID NO:79), an uncharacterized protein, is approximately 5275 nucleotides long including untranslated regions. The coding sequence, located at about nucleic acids 37 to 2706 of SEQ ID NO:79, encodes an 889 amino acid protein (SEQ ID NO:80).

[0572] As assessed by TaqMan analysis on a tissue panel, 49928 mRNA is expressed at a 5-fold increased level in the primary ovary tumor pool, at a 5-fold increased level in the primary colon tumor pool, and at an 11-fold increased level in the primary lung tumor pool when compared to their respective normal tissue pools. Other samples with high 49928 mRNA expression include pancreas, erythroid, brain and kidney.

[0573] In an oncology TaqMan tissue panel, 49928 mRNA is expressed at 2-162 fold increased levels in 5/5 primary breast tumor samples vs. 3/3 normal breast tissue samples, at 2-11 fold increased levels in 5/5 primary lung tumor samples vs. 3/3 normal lung tissue samples and at 3-13 fold increased levels in 2/3 primary colon tumor samples vs. 2/3 normal colon tissue samples.

[0574] In an ovarian cell synchronization TaqMan panel, 49928 mRNA shows regulation throughout the cell cycle. At 12 hrs post-release from a G2 block with 0.5 ug/ul nocadazole, SKOV-3 cells are in GI and express 3-fold increased levels of 49928. At 12 hrs post-release from a G2 block with 0.5 ug/ul nocadazole, OVCAR4 cells are in GI and express 2-fold increased levels of 49928. At 12 hrs post-release from a Gi block with 0.2 uM mimosine, SKOV-3 cells are in G2 and express 2-fold decreased levels of 49928. Therefore, 49928 mRNA appears to be expressed at higher levels in G1/S vs. G2/M.

[0575] In an oncology xenograft cell line TaqMan panel, 49928 mRNA is expressed in a subset of cell lines, including T47D, ZR75, MCF-7 and NCIH67.

[0576] 49928 is a protein of unknown function. 49928 has 40% amino acid identity to human 2-oxoglutarate dehydrogenase (D10523), also known as alpha-ketoglutarate dehydrogenase. The alpha-ketoglutarate dehydrogenase complex is a multienzyme complex consisting of 3 protein subunits, alpha-ketoglutarate dehydrogenase (Elk, or oxoglutarate dehydrogenase; OGDH, EC 1.2.4.2), dihydrolipoyl succinyltransferase (E2k, or DLST), and dihydrolipoyl dehydrogenase (E3). The complex catalyzes a key reaction in the Krebs tricarboxylic acid cycle, converting a-ketoglutarate to succinyl coenzyme A. With homology to oxoglutarate dehydrogenase, 49928 could contribute to energy production via the Krebs cycle.

[0577] 49928 mRNA is expressed at increased levels in subset of breast, ovarian, lung and colon tumors. 49928 also shows cell cycle-dependent regulation and some homology to a subunit (E1) of the 2-oxoglutarate dehydrogenase multienzyme complex. Tumors may require increased levels of 49928 for cell-cycle regulated energy production. Inhibition of this enzyme may inhibit tumor growth.

[0578] Due to 49928 function and expression, modulators of 49928 activity would be useful in treating human cancers, including but not limited to breast, ovarian, colon and lung cancers. 49928 polypeptides of the present invention are useful in screening for modulators of 49928 activity.

[0579] Gene ID 54476

[0580] The human 54476 sequence (SEQ ID NO:81), known also as uncharacterized protein KIAA1290, is approximately 3622 nucleotides long including untranslated regions. The coding sequence, located at about nucleic acids 6 to 3038 of SEQ ID NO:81, encodes an 1010 amino acid protein (SEQ ID NO:82).

[0581] As assessed by TaqMan analysis, 54476 mRNA expression is restricted to a few tissues. Of the epithelial tumor pools on this panel, 54476 mRNA is expressed in the ovarian tumor pool. Other 54476 expressing tissue samples include brain, kidney and liver.

[0582] In an oncology tissue panel, 54476 mRNA is expressed at 32-122 fold increased levels in 4/5 primary ovary tumor samples vs. 2/2 normal ovary samples. Little or no expression was observed in breast, lung and colon tumors.

[0583] In an oncology xenograft cell line panel, 54476 mRNA is expressed in many tumor cell lines, including OVCAR3.

[0584] In an LRO synchronized cell panel, 54476 mRNA expression decreases 7-fold at 12 hours post-release from a mimosine block of the cell cycle, suggesting increased expression in G1.

[0585] In situ hybridization analysis of 54476 mRNA showed expression of this gene in ovarian carcinomas. No expression was seen in colon or lung tumors. Some expression was seen in infiltrating lymphocytes present in normal colon and colonic tumor samples. Normal liver and normal kidney showed some expression.

[0586] 54476 is a protein of unknown function with 80% identity to 2-oxoglutarate decarboxylase, a subunit (E1) of the 2-oxoglutarate dehydrogenase multienzyme complex. The 2-oxoglutarate dehydrogenase complex (OGDHC) converts 2-oxoglutarate into succinyl-CoA as part of the citric acid cycle. The citric acid cycle is a central metabolic pathway into which all carbon compounds used by the cell will flow into and from which all biosynthetic needs of carbon compounds are satisfied. The cycle provides the complete oxidation of C2 units (acetyl-CoA) into carbon dioxide and gaining reductive power in the form of NADH and FADH₂. The cycle also provides metabolic intermediates for biosynthetic purposes of gluconeogenesis and amino acids and produces 1 GTP.

[0587] 54476 expression in tumors is specific to ovarian cancers. Overexpression of 54476 in these cancers suggests a unique requirement for the activity of this enzyme in ovarian cancer. Inhibition of 54476 is predicted to inhibit the growth of ovarian cancers.

[0588] Due to 54476 function and expression, modulators of 54476 activity would be useful in treating human cancers, including but not limited to ovarian cancer. 54476 polypeptides of the present invention are useful in screening for modulators of 54476 activity.

[0589] Gene ID 62113

[0590] The human 62113 sequence (SEQ ID NO:83), a predicted acyl-CoA dehydrogenase of unknown function, is approximately 3030 nucleotides long including untranslated regions. The coding sequence, located at about nucleic acids 238 to 2580 of SEQ ID NO:83, encodes an 780 amino acid protein (SEQ ID NO:84).

[0591] As assessed by TaqMan analysis, 62113 mRNA is expressed in tumors of breast, ovary, lung and colon. Lung tumors specifically seem to express 62113 mRNA at increased levels and therefore may have an increased dependency on 62113 enzymatic function.

[0592] 62113 is a predicted acyl-CoA dehydrogenase of unknown function. Acyl-CoA dehydrogenases [1,2,3] are enzymes that catalyze the alpha,beta-dehydrogenation of acyl-CoA esters and transfer electrons to ETF, the electron transfer protein. Acyl-CoA dehydrogenases are FAD flavoproteins. This family currently includes five eukaryotic isozymes that catalyze the first step of the beta-oxidation cycles for fatty acids with various chain lengths. These are short (SCAD) (EC 1.3.99.2), medium (MCAD) (EC 1.3.99.3), long (LCAD) (EC 1.3.99.13), very-long (VLCAD) and short/branched (SBCAD) chain acyl-CoA dehydrogenases. These enzymes are located in the mitochondrion. They are all homotetrameric proteins of about 400 amino acid residues except VLCAD which is a dimer and which contains, in its mature form, about 600 residues.

[0593] Overexpression of this gene may be linked to the increased energy requirements for rapidly growing and dividing tumor cells. Therefore, inhibition of this acyl-CoA dehydrogenase may inhibit tumor growth.

[0594] Due to 62113 function and expression, modulators of 62113 activity would be useful in treating human cancers, including but not limited to breast, ovarian, colon and lung cancers. 62113 polypeptides of the present invention are useful in screening for modulators of 62113 activity.

[0595] Gene ID 64316

[0596] The human 64316 sequence (SEQ ID NO:85), known also as NAD synthetase 1, is approximately 2404 nucleotides long including untranslated regions. The coding sequence, located at about nucleic acids 97 to 2217 of SEQ ID NO:85, encodes a 706 amino acid protein (SEQ ID NO:86).

[0597] As assessed by TaqMan analysis, 64316 mRNA expression was increased 3-fold in pooled colon tumors relative to pooled normal colons. 64316 mRNA expression was also elevated 2.5-fold in pooled lung tumors relative to pooled normal lung. Other tissues with high 64316 mRNA expression included human umbilical vein endothelial cells (HUVEC), brain cortex and erythroid cells.

[0598] Further TaqMan analysis on an oncology panel showed 64316 mRNA expression was increased in 2/6 breast tumors (3 to 4.5 fold) relative to 3 normal breast samples, in 4/6 lung tumors (2 to 3.5 fold) relative to 3 normal lung samples, in 3/5 colon tumors (2 to 6.5 fold) relative to 2 normal colon samples, and in 2/2 prostate tumors (2.5 fold) relative to 2 normal prostate samples.

[0599] TaqMan analysis on a colon metastases panel showed 64316 mRNA expression was increased in 3/4 colon tumors (2 to 2.5 fold) and in 8/16 colon to liver metastases (2 to 4 fold) relative to 3 normal colon and 3 normal liver samples.

[0600] TaqMan analysis on an expanded breast tumor panel showed 64316 mRNA expression was increased in 8/20 breast tumors (2 to 6 fold) relative to 2/4 normal breast samples. The high 64316 expression in 2/4 normal breast samples is suspected to be an artifact as these samples demonstrate high expression in almost all genes tested.

[0601] TaqMan analysis on an expanded lung tumor panel showed 64316 mRNA expression was increased in 8/33 lung tumors (2 to 3 fold) relative to 5 normal lungs and 1 normal lung trachea.

[0602] 64316 expression was detected at low levels in 2/2 normal lungs by in situ hybridization. 64316 expression was detected at high levels in 0/2 lung squamous cell carcinomas, in 2/2 lung adenocarcinomas and in 2/2 poorly differentiated non-small cell carcinomas. 64316 was detected at low levels in 3/4 colon to liver metastases and at high levels in 1/4 colon to liver metastases.

[0603] 64316 encodes NAD synthetase 1, which catalyzes the final metabolic step in NAD biosynthesis (Journal of Biological Chemistry; 278(13):10914-21 (2003)). The coenzyme NAD plays a major role in metabolism as it participates in the majority of cellular reductive/oxidative reactions. 64316 may make an ideal target for anti-cancer drug development, as depletion of NAD is known to result in cell death (Trends Pharmacol Sci; 20:171-81 (1999)). In addition, decreased NAD levels may increase p53-dependent apoptosis in response to DNA damage or oxidative stress as a result of reduced NAD-dependent p53 deacetylation induced by Sir2 (Cell; 107:137-148 (2001)). As depletion of NAD leads to cell death, selective inhibition of 64316 may result in decreased NAD, leading to inhibition and/or reduction of tumor growth.

[0604] Due to 64316 function and expression, modulators of 64316 activity would be useful in treating human cancers, including but not limited to breast, colon and lung cancers. 64316 polypeptides of the present invention are useful in screening for modulators of 64316 activity.

[0605] Gene ID 12264

[0606] The human 12264 sequence (SEQ ID NO:87), known also as kinesin-like protein KIF2 (Kinesin-2) (HK2), is approximately 2905 nucleotides long including untranslated regions. The coding sequence, located at about nucleic acids 19 to 2058 of SEQ ID NO:87, encodes a 679 amino acid protein (SEQ ID NO:88).

[0607] As assessed by TaqMan analysis, 12264 mRNA was expressed at higher levels in colon and lung tumors (single sample pool of 3 tumors) with respect to normal colon and lung (single sample pool of 3 tissue samples). 12264 mRNA was also highly expressed in human umbilical vein endothelial cells (HUVEC), brain cortex, hypothalamus and megakaryocytes (single sample pool of 3 tissue samples).

[0608] Further TaqMan analysis on an oncology tissue panel indicated that 12264 mRNA was expressed at increased levels in 1/6 breast, in 6/6 lung, and in 1/5 colon tumors when compared to their respective normal tissue samples (3/3 breast, 3/3 lung, 3/3 colon). 12264 mRNA was expressed at increased levels in proliferating human microvascular endothelial cells (HMVEC) relative to arrested HMVEC.

[0609] TaqMan analysis of an angiogenesis panel (fetal vs. adult tissues) indicated that 12264 mRNA was expressed at increased levels in fetal liver (2/2), in adrenal (2/3), in kidney (2/2) and in umbilical cord (2/2) relative to adult angiogenic tissue samples (23/24). 12264 mRNA was also expressed at increased levels in uterine and endometrial adenocarcinomas (5/9). TaqMan analysis using another angiogenesis panel (hemangiomas and necrotic and angiogenic tumors) indicated that 12264 mRNA was expressed at higher levels in 2/8 hemangiomas relative to 1/1 normal skin tissue samples. 12264 mRNA was also expressed at higher levels in necrotic tumors (1/4 ovary, 3/3 colon, and 3/3 lung tumors) and in Wilm's tumor relative to normal controls (ovary (1/1), colon (1/1), lung (1/1), and kidney (1/1)).

[0610] In an expanded lung tumor panel, TaqMan analysis indicated that 12264 mRNA was increased in 14/32 lung tumors when compared to 6/6 normal lung tissue samples.

[0611] In a colon ACA tumor panel, TaqMan analysis indicated that 12264 mRNA was increased in 6/15 colon primary tumors when compared to 5/6 normal colon tissue samples and in 3/5 colon tumor metastasis samples when compared to either 6/6 normal colon tissue samples or 6/6 normal liver tissue samples.

[0612] In a colon tumor metastasis panel, TaqMan analysis indicated that 12264 mRNA was increased in 4/16 samples of colon tumor metastasis to the liver when compared to either 3/3 normal colon tissue samples or 3/3 normal liver tissue samples. 12264 mRNA expression was also increased in 6/14 samples of colon tumor metastasis to other sites when compared to 3/3 normal colon tissue samples.

[0613] TaqMan analysis of 12264 mRNA expression in an “endothelial cell in vitro proliferation, arrest and tube formation” panel indicated increased expression in proliferating HUVEC (1/1) and lung HMVEC (3/3) when compared to arrested HUVEC (1/1) and lung HMVEC (3/3).

[0614] In situ experiments conducted on 12264 indicated expression of 12264 in primary colon and lung tumors as well as in a number of fetal tissues and Wilhm's tumor. Most tumor foci in each tumor sample are positive for expression. Very little stromal expression was seen. Normal colon tissue showed some low level expression in epithelial cells, with some background in infiltrating lymphocytes. Normal lung tissue was mostly negative.

[0615] The Kin I subfamily of kinesins are microtubule depolymerases. MCAK is a kinesin important to anaphase progression and localizes to the centromere. KIF2 localizes to the lysosome. It appears to be involved in protein trafficking, e.g., KIF2 suppression by antisense treatment results in a dramatic accumulation of betagc, a beta subunit of the IGF-1 receptor, within the cell body and its complete disappearance from growth cones. KIF2 suppression produces a dramatic inhibition of neurite outgrowth (J Cell Biol, 138:657-69 (1997)). Taxol affects protein trafficking within the cell and these effects may be important to its efficacy. KIF2 inhibition would prevent protein trafficking by interfering with microtubule dynamics associated with lysosomal/endosomal function. The function of key receptors and secreted proteins would thereby be prevented.

[0616] Due to 12264 function and expression, modulators of 12264 activity would be useful in treating human cancers, including but not limited to breast, colon and ovarian cancers, and tumor angiogenesis. 12264 polypeptides of the present invention are useful in screening for modulators of 12264 activity.

[0617] Gene ID 32362

[0618] The human 32362 sequence (SEQ ID NO:89), known also as serine/threonine protein kinase SAK, is approximately 3092 nucleotides long including untranslated regions. The coding sequence, located at about nucleic acids 141 to 3053 of SEQ ID NO:89, encodes a 970 amino acid protein (SEQ ID NO:90).

[0619] Transcriptional profiling identified increased expression of 32362 mRNA in a subset of lung tumors when compared to normal lung samples.

[0620] TaqMan analysis demonstrated that 32362 mRNA expression was restricted in normal tissues. 32362 mRNA expression was upregulated in breast (1/6), in ovarian (4/5), in colon (4/4), and in lung (3/5) tumors as compared to their respective normal controls. The trend of increased tumor expression (albeit at low levels) was confirmed in TaqMan analyses of an expanded lung panel (12/33 primary tumors) and an expanded breast panel (8/15 primary tumors).

[0621] In situ hybridization showed low 32362 mRNA expression in normal lung and ovarian samples with increased levels of expression in lung and ovarian tumors.

[0622] SAK is a member of the polo family of kinases. As with its better-known homologue PLK1, SAK function has been implicated in the progression of cells through mitosis (Proc Natl Acad Sci USA., 91:6388-92 (1994)). Knockout of this gene in mice results in embryonic day 7.5 lethality, characterized by a marked increase in mitotic and apoptotic cells in the embryo (Curr Biol., 11:441-6 (2001)). Increased expression of SAK in tumors may facilitate proliferation by enabling progression of the cells through mitosis.

[0623] Due to 32362 function and expression, modulators of 32362 activity would be useful in treating human cancers, including but not limited to breast, lung and ovarian cancers. 32362 polypeptides of the present invention are useful in screening for modulators of 32362 activity.

[0624] Gene ID 58198

[0625] The human 58198 sequence (SEQ ID NO:91), a novel tetrahydrofolate dehydrogenase/cyclohydrolase, is approximately 3164 nucleotides long including untranslated regions. The incomplete coding sequence, located at about nucleic acids 3 to 2756 of SEQ ID NO:91, encodes a 917 amino acid protein (SEQ ID NO:92).

[0626] As assessed by TaqMan analysis, 58198 mRNA expression was increased approximately 300-fold in pooled colon tumors relative to pooled normal colons. 58198 mRNA expression was also elevated 5-fold in pooled lung tumors relative to pooled normal lung and 2.5-fold in pooled breast tumors relative to pooled normal breast. Other tissues expressing high 58198 mRNA levels included human umbilical vein endothelial cells (HUVEC), normal artery, coronary smooth muscle cells, primary osteoblasts, and normal brain cortex.

[0627] In an oncology TaqMan panel, 58198 mRNA expression was increased 2.5 to 7-fold in breast tumors relative to normal breast samples, 2 to 4.5-fold in lung tumors relative to normal lung samples, and 3 to 7.5-fold in colon tumors relative to normal colon samples. 58198 mRNA was expressed at high levels in the human colorectal carcinoma cell line HCT116.

[0628] In an expanded colon tumor panel, 58198 mRNA expression was increased 3 to 15-fold in colon tumors and 4 to 31-fold in colon to liver metastases. 58198 mRNA was expressed at very low levels in normal liver.

[0629] In a colon metastasis panel, 58198 mRNA expression was increased 7.5 to 19-fold in colon tumors, 3 to 50-fold in colon to liver metastases and 2 to 31-fold in colon metastases to tissues other than the liver. 58198 mRNA was expressed at low levels in normal liver.

[0630] In an expanded lung tumor panel, one normal lung sample expressed moderately high 58198 mRNA levels. Omitting that sample, 58198 mRNA expression was increased 2 to 31-fold in 13/33 lung tumors relative to normal lung and normal lung trachea.

[0631] In an expanded breast tumor panel, 58198 mRNA expression was increased 2.5 to 6-fold in breast tumors and 5-fold in a breast tumor metastases when compared to normal breast tissue samples.

[0632] 58198 mRNA expression is increased in some colon, lung and breast tumors. 58198 encodes a novel methylenetetrahydrofolate dehydrogenase/methenyl cyclohydrogenase. This family of enzymes participates in folate-mediated one-carbon metabolism, which is essential to nucleic acid biosynthesis, mitochondrial protein biosynthesis, amino acid biosynthesis and vitamin metabolism (Biochemistry, 29:7089-7094 (1990); Biochem J, 350:609-29 (2000); MCB, 22(12): 4158-66 (2002)). As 58198 expression is increased in some cancers, and because it plays a role in several essential biosynthetic processes associated with cell growth regulation, it may make an ideal target for anti-cancer drug design. Selective inhibition of 58198 may result in inhibition and/or reduction of tumor growth.

[0633] Due to 58198 function and expression, modulators of 58198 activity would be useful in treating human cancers, including but not limited to breast, colon and lung cancers. 58198 polypeptides of the present invention are useful in screening for modulators of 58198 activity.

[0634] Gene ID 2887

[0635] The human 2887 sequence (SEQ ID NO:93), known also as glutamate dehydrogenase 1, is approximately 2970 nucleotides long including untranslated regions. The coding sequence, located at about nucleic acids 14 to 1690 of SEQ ID NO:93, encodes a 558 amino acid protein (SEQ ID NO:94).

[0636] As assessed by TaqMan analysis, 2887 mRNA expression was broad in normal tissues, with the highest expression observed in CNS tissues. 2887 mRNA showed limited upregulated expression in breast (3/6), in lung (1/6) and in colon tumors (2/5) when compared to their respective normal tissues.

[0637] In situ hybridization experiments consucted on 2887 indicated that 2887 is expressed in primary colon (3/4), in lung (3/3), and in ovarian (4/5) carcinomas. Normal tissue showed little or no expression. Lung and ovarian tumors showed the highest and most homogeneous expression.

[0638] Expression of 2887 mRNA in RNAi transfected cells was >20% of that seen in mock transfected controls.

[0639] Treatment of tumor cells with RNAi directed against 2887 mRNA results in varying levels of growth inhibition (72 hours post-transfection) in the following cell lines:

TABLE 1

| Cell Line | % Growth Inhibition |
|---|---|
| A549 | 44% (1 of 2 assays) |
| HCT116 | 35% (average, 2 of 3 assays) |
| HT29 | 43% (one assay) |

[0640] Reduction of 2887 mRNA expression in tumor cells by transfection with siRNA oligos specific for that gene results in cell growth inhibition. RNAi studies in three different cell lines (A549, HT29, and HCT116) showed somewhat consistent growth inhibition over a 72-hour period. Small molecule inhibitors of 2887 would be expected to have a similar effect on tumor cell growth, and are therefore attractive cancer therapeutic candidates.

[0641] Due to 2887 function and expression, modulators of 2887 activity would be useful in treating human cancers, including but not limited to breast, colon and lung cancers. 2887 polypeptides of the present invention are useful in screening for modulators of 2887 activity.

[0642] Gene ID 3205

[0643] The human 3205 sequence (SEQ ID NO:95), known also as arginine N-methyltransferase 2, is approximately 2096 nucleotides long including untranslated regions. The coding sequence, located at about nucleic acids 177 to 1478 of SEQ ID NO:95, encodes a 433 amino acid protein (SEQ ID NO:96).

[0644] As assessed by TaqMan analysis, 3205 mRNA expression was broad in normal tissues, with the highest expression observed in CNS tissues. 3205 mRNA expression was upregulated in lung tumors (5/6) when compared to normal lung tissues.

[0645] Expression of 3205 mRNA in RNAi transfected cells was 20% of that seen in mock transfected controls.

[0646] Treatment of tumor cells with RNAi directed against 3205 mRNA results in varying levels of growth inhibition (72 hours post-transfection) in the following cell lines:

TABLE 2

| Cell Line | % Growth Inhibition |
|---|---|
| A549 | 62% (average, 2 separate assays) |
| HCT116 | 51% (average, 3 separate assays) |
| HT29 | 58% (one assay) |

[0647] Reduction of 3205 mRNA expression in tumor cells by transfection with siRNA oligos specific for that gene results in cell growth inhibition. RNAi studies in three different cell lines (A549, HT29, and HCT116) showed levels of growth inhibition upon 3205 mRNA expression reduction comparable to those seen in the PLK1 positive control. Small molecule inhibitors of 3205 would be expected to have a similar effect on tumor cell growth, and are therefore attractive cancer therapeutic candidates.

[0648] Due to 3205 function and expression, modulators of 3205 activity would be useful in treating human cancers, including but not limited to lung cancer. 3205 polypeptides of the present invention are useful in screening for modulators of 3205 activity.

[0649] Gene ID 8557

[0650] The human 8557 sequence (SEQ ID NO:97), known also as aldose reductase, is approximately 1331 nucleotides long including untranslated regions. The coding sequence, located at about nucleic acids 10 to 960 of SEQ ID NO:97, encodes a 316 amino acid protein (SEQ ID NO:98).

[0651] As assessed by TaqMan analysis, 8557 mRNA expression was broad in normal tissues, with the highest expression observed in adrenal gland and kidney. 8557 mRNA expression was upregulated in lung (3/6) and in breast tumors (2/6) when compared to their respective normal tissues.

[0652] In situ hybridization experiments conducted on 8557 indicated that 8557 mRNA is expressed in primary breast (4/5) and lung tumors (5/5). Lung tumors showed greater and more homogeneous expression as compared to breast tumors. No expression was seen in normal breast or lung tissue.

[0653] Expression of 8557 mRNA in RNAi transfected cells was >10% of that seen in mock transfected controls.

[0654] Treatment of tumor cells with RNAi directed against 8557 results in varying levels of growth inhibition (72 hours post-transfection) in the following cell lines:

TABLE 3
Example Bottle Neck and Tolerances for use with Closure Capsules

| Station | Nominal Diameter | Tolerance |
|---|---|---|
| A | 1.294* inches | +/−0.031 inches |
| B | D - 0.088 inches | +/−0.020 inches |
| C | D - 0.160 inches | +/−0.020 inches |
| D | D - 0.120 inches | +0.013/−0.012 inches |

*OR any desirable bottleneck diameter

[0655] Reduction of 8557 mRNA expression in tumor cells by transfection with siRNA oligos specific for that gene results in cell growth inhibition. RNAi studies in three different cell lines (A549, HT29, and HCT116) showed consistent growth inhibition over a 72-hour period. Small molecule inhibitors of 8557 would be expected to have a similar effect on tumor cell growth, and are therefore attractive cancer therapeutic candidates.

[0656] Due to 8557 function and expression, modulators of 8557 activity would be useful in treating human cancers, including but not limited to breast and lung cancers. 8557 polypeptides of the present invention are useful in screening for modulators of 8557 activity.

[0657] Gene ID 9600

[0658] The human 9600 sequence (SEQ ID NO:99), known also as 7,8-dihydro-8-oxoguanine triphosphatase (8-oxo-dGTPase), is approximately 772 nucleotides long including untranslated regions. The coding sequence, located at about nucleic acids 30 to 623 of SEQ ID NO:99, encodes a 197 amino acid protein (SEQ ID NO:100).

[0659] As assessed by TaqMan analysis, 9600 mRNA is expressed at a 15-fold increased level in the colon tumor pool vs. the normal colon tissue pool, and at a 6-fold increased level in the lung tumor pool vs. the normal lung tissue pool. Other samples expressing 9600 mRNA include erythroid cells, human umbilical vein endothelial cells (HUVEC), megakaryocytes and primary osteoblasts (each of these samples has been cultured in vitro).

[0660] In an oncology TaqMan panel, 9600 mRNA is expressed at increased levels (5-62 fold) in primary lung tumors when compared to normal lung tissue samples. 9600 mRNA is expressed at increased levels (12-308 fold) in primary breast tumors and at increased levels (3-16 fold) in primary colon tumor samples. 9600 mRNA is expressed at 58-fold increased level in a pooled colon to liver metastases sample when compared to a normal liver sample.

[0661] In an expanded lung cancer tissue panel, 9600 mRNA is expressed at increased levels (2-40 fold) in primary lung tumors when compared to normal lung tissue samples.

[0662] In an expanded colon cancer tissue panel, 9600 mRNA is not expressed (Cts>33) in normal liver samples, but is expressed (Cts<28) in colon metastases to the liver.

[0663] In an oncology xenograft cancer cell line panel, 9600 mRNA is expressed at variable levels in all tumor cell lines. Some cell lines express very high levels (Cts=22), including MCF-7, NCI-H322 and NCI-H69.

[0664] In a breast cancer cell model panel, 9600 mRNA is expressed at a 2.5-fold increased level in transformed, activated H-ras-expressing MCF10AT1 cells vs. normal MCF10A cells, and at a 2-fold increased level in transformed, activated H-ras-expressing MCF10AT3B cells vs. normal MCF10A cells.

[0665] In a lung cancer cell model panel, 9600 mRNA expression is reduced 3-fold in H125 cells expressing a p53:ERhb protein and induced for p53 activity with 4-hydroxytamoxifen.

[0666] One form of DNA damage caused by oxygen radicals is the oxidation of guanine base (8-oxoguanine). The catalytic activity of 8-oxo-dGTPase (NUDT1 or MTH1) is: 8-oxo-dGTP+H2O=8-oxo-dGMP+diphosphate. It also acts on other purine nucleoside triphosphates. 8-oxo-dGTPase is responsible for preventing misincorporation of 8-oxo-dGTP into DNA, thus preventing A:T to C:G transversions and protecting genetic information from the deleterious effects of oxygen radicals. The highest expression levels are seen in thymus, testis, embryo and PBLs.

[0667] 9600 mRNA is expressed at increased levels in a subset of epithelial tumors, notably primary lung tumors and colon cancer metastases. Rapidly proliferating tissues require increased capacity for maintaining genome integrity. Increased expression of 8-oxo-dGTPase may serve to protect tumor cells against DNA damaging effects of oxygen radicals. Inhibiting the 8-oxo-dGTPase activity of tumor cells may result in irreparable DNA damage and cell death.

[0668] Due to 9600 function and expression, modulators of 9600 activity would be useful in treating human cancers, including but not limited to breast, colon and lung cancers. 9600 polypeptides of the present invention are useful in screening for modulators of 9600 activity.

[0669] Gene ID 9693

[0670] The human 9693 sequence (SEQ ID NO:101), known also as chlordecone reductase, is approximately 972 nucleotides long including untranslated regions. The coding sequence, located at about nucleic acids 1 to 972 of SEQ ID NO:101, encodes a 323 amino acid protein (SEQ ID NO:102).

[0671] As assessed by TaqMan analysis, 9693 mRNA expression was broad in normal tissues, with the highest expression in skeletal muscle and liver. Increased 9693 mRNA expression was observed in breast (1/6) and lung (2/6) tumors when compared to their respective normal tissues. 9693 mRNA was upregulated in a pool of 3 lung tumors versus lung normal tissue.

[0672] In an oncology xenograft cancer cell line panel, 9693 mRNA is expressed at variable levels in a subset of tumor cell lines. Some cell lines express very high levels (Cts=22), including MCF-7, NCI-H322, NCI-H460, and A549.

[0673] In situ hybridization experiments conducted on 9693 indicated that 9693 mRNA was highly over-expressed in lung carcinoma (3/5); moreover, this target appears to be more specific to squamous cell carcinomas as compared to adenocarcinoma. Both the ISH expression data and clinical TaqMan data indicate preferential expression in squamous cell histology. Clinical TaqMan data indicated that 9693 is a lung cancer target and this was confirmed by ISH.

[0674] Expression of 9693 mRNA in RNAi transfected cells was >20% of that seen in mock transfected controls.

[0675] Treatment of tumor cells with RNAi directed against 9693 results in varying levels of growth inhibition (72 hours post-transfection) in the following cell lines:

TABLE 4

| Cell Line | % Growth Inhibition |
|---|---|
| A549 | 36% (1 of 2 assays) |
| HCT116 | 44% (average, 3 of 3 assays) |
| HT29 | 43% (one assay) |

[0676] Reduction of 9693 mRNA expression in tumor cells by transfection with siRNA oligos specific for that gene results in cell growth inhibition. RNAi studies in three different cell lines (A549, HT29, and HCT116) showed somewhat consistent growth inhibition over a 72-hour period. Small molecule inhibitors of 9693 would be expected to have a similar effect on tumor cell growth, and are therefore attractive cancer therapeutic candidates.

[0677] Due to 9693 function and expression, modulators of 9693 activity would be useful in treating human cancers, including but not limited to lung cancer. 9693 polypeptides of the present invention are useful in screening for modulators of 9693 activity.

[0678] Gene ID 44867

[0679] The human 44867 sequence (SEQ ID NO:103), which is similar to Bmp2-inducible kinase, is approximately 2770 nucleotides long including untranslated regions. The partial coding sequence, located at about nucleic acids 2 to 2563 of SEQ ID NO:103, encodes a 853 amino acid protein (SEQ ID NO:104).

[0680] As assessed by TaqMan analysis, 44867 mRNA expression was highest in erythroid cells, megakaryocytes, and CNS tissues. 44867 mRNA had lower expression in heart and pancreas. There was no expression in other tissues tested. 44867 mRNA expression was upregulated in lung, breast and colon tumors on a clinical panel as compared to their respective normal tissues. 44867 mRNA expression was also upregulated in lung tumor samples as compared to normal lung tissue samples on an expanded TaqMan panel. There was decreased 44867 mRNA expression in NCI-H125 cells upon activation of a p53ER fusion protein.

[0681] In situ hybridization (ISH) showed low 44867 mRNA expression in normal lung samples and lung tumors tested. There was no expression in normal colon, with epithelial expression in colon tumor samples. There was also low 44867 mRNA expression in normal breast and breast tumor samples.

[0682] 44867 is the human homologue of the mouse BMP-2 inducible kinase, a recently identified protein that has been shown to attenuate osteoblast differentiation (J. Biol. Chem. 276(45): 42213-42218 (2001)). While not wanting to be bound by theory, it is hypothesized that 44867 expression in tumor cells may play a role in locking them into an immature state, enabling continued proliferation in environments where the cells would otherwise terminally differentiate.

[0683] Due to 44867 function and expression, modulators of 44867 activity would be useful in treating human cancers, including but not limited to breast, colon and lung cancers. 44867 polypeptides of the present invention are useful in screening for modulators of 44867 activity.

[0684] Gene ID 53058

[0685] The human 53058 sequence (SEQ ID NO:105), known also as BMK1 alpha kinase, MAP kinase 7 and Erk5, is approximately 2980 nucleotides long including untranslated regions. The coding sequence, located at about nucleic acids 222 to 2672 of SEQ ID NO:105, encodes a 816 amino acid protein (SEQ ID NO:106).

[0686] As assessed by TaqMan analysis, 53058 mRNA expression was generally low in normal tissues, with the highest expression in CNS tissue and normal artery. Further TaqMan analyses using an oncology panel demonstrated that 53058 mRNA expression increased in lung tumors (3/6) and in breast tumors (2/6) when compared to their respective normal tissues.

[0687] In situ hybridization experiments conducted on 53058 showed very low 53058 mRNA expression in 2 normal lung samples and low to moderate expression in 4/5 lung tumors tested. There was no 53058 mRNA expression in normal breast (1/1), with low to moderate expression in 3/3 breast tumor samples.

[0688] 53058 is the human ERK5 gene, a MAP kinase family member that has been implicated in downstream signaling of the ErbB receptor and raf oncogenes (Mol. Cell. Biol. 22(1):270-85 (2002); J. Biol. Chem. 274(44):31588-92(1999)), as well as in the NF-kappaB pathway (J. Biol. Chem. 276(11):7927-31 (2001)). High expression of Erk5 in tumors may increase the proliferative and survival capacity of tumor cells.

[0689] Due to 53058 function and expression, modulators of 53058 activity would be useful in treating human cancers, including but not limited to breast and lung cancers. 53058 polypeptides of the present invention are useful in screening for modulators of 53058 activity.

[0690] Gene ID 55556

[0691] The human 55556 sequence (SEQ ID NO:107), known also as serine/threonine-protein kinase PAK 6 (p21-activated kinase 6) (PAK-6), is approximately 2669 nucleotides long including untranslated regions. The coding sequence, located at about nucleic acids 199 to 2244 of SEQ ID NO:107, encodes a 681 amino acid protein (SEQ ID NO:108).

[0692] As assessed by TaqMan analysis, 55556 mRNA had restricted tissue expression: the highest expression was in CNS tissues, with lower expression in pancreas and kidney. There was significant upregulation of 55556 mRNA expression in tumors of the breast, ovary, lung and colon when compared to their respective normal tissues. There was also increased expression in lung tumors as compared to normal lung samples on an expanded lung tumor TaqMan panel.

[0693] 55556 is human PAK6, a member of the PAK kinase family that is distinguished by binding domains for the cdc42 and rac small G proteins (J. Int. J. Biochem. Cell. Biol. 34(7):713-7 (2002)). While the function of PAK6 has not been well characterized, recent studies suggest that it can bind to and modulate the transcriptional activity of steroid hormone receptors (Mol. Endocrinol. 16(1):85-99 (2002)).

[0694] While not wanting to be bound by theory, it is hypothesized that high expression of PAK6 in tumor cells alters their proliferative and metastatic potential by altering the transcriptional environment in these cells.

[0695] Due to 55556 function and expression, modulators of 55556 activity would be useful in treating human cancers, including but not limited to breast, colon, lung and ovarian cancers. 55556 polypeptides of the present invention are useful in screening for modulators of 55556 activity.

[0696] Gene ID 57658

[0697] The human 57658 sequence (SEQ ID NO:109), known also as uridine-cytidine kinase 1 (UCK 1), is approximately 2160 nucleotides long including untranslated regions. The coding sequence, located at about nucleic acids 95 to 928 of SEQ ID NO:109, encodes a 277 amino acid protein (SEQ ID NO:110).

[0698] As assessed by TaqMan analysis, 57658 mRNA expression was broad in normal tissues, with the highest expression in CNS tissues and erythroid cells. Further TaqMan experiments conducted on an oncology tissue panel demonstrated that 57658 was upregulated in 2/6 breast tumors and in 5/6 lung tumors when compared to their respective normal tissues.

[0699] In an oncology xenograft cancer cell line panel, 57658 mRNA was expressed at variable levels in all tumor cell lines. Some cell lines express very high levels (Cts=24), including MCF-7, NCI-H69 and 293.

[0700] In situ experiment conducted on 57658 indicated that 57658 mRNA is expressed in primary lung (4/5), colon (4/4), and ovarian (2/3) tumors. Although some normal tissues are positive, the expression levels are much lower than that seen in the tumor counterpart. The clinical TaqMan data indicated that 57658 is regulated in breast and lung tumors, whereas the in situ data showed more regulation between normal ovarian tissue and ovarian tumor as compared to the TaqMan data. 57658 appears to be primarily a lung and ovarian target based on regulation and expression patterns.

[0701] Expression of 57658 mRNA in RNAi transfected cells was ˜50% of that in mock transfected controls.

[0702] Treatment of tumor cells with siRNA directed against 57658 mRNA results in growth inhibition (72 hours post-transfection) in the following cell lines:

TABLE 5

| Cell Line | % Growth Inhibition |
|---|---|
| HCT116 | 47.8% (average, 2 of 3 assays) |

[0703] Reduction of 57658 mRNA expression in tumor cells by transfection with siRNA oligos specific for that gene results in cell growth inhibition. RNAi studies in HCT116 cells showed levels of growth inhibition comparable to the PLK1 positive control. Small molecule inhibitors of 57658 would be expected to have a similar effect on tumor cell growth, and are therefore attractive cancer therapeutic candidates.

[0704] Due to 57658 function and expression, modulators of 57658 activity would be useful in treating human cancers, including but not limited to breast and lung cancers. 57658 polypeptides of the present invention are useful in screening for modulators of 57658 activity.

[0705] Gene ID 2208

[0706] The human 2208 sequence (SEQ ID NO:111), known also as PTEN induced putative kinase 1, is approximately 2162 nucleotides long including untranslated regions. The coding sequence, located at about nucleic acids 76 to 1821 of SEQ ID NO:111, encodes a 581 amino acid protein (SEQ ID NO:112).

[0707] As assess by TaqMan analysis, 2208 mRNA showed broad normal tissue expression with the highest expression in CNS tissues. Further TaqMan experiments conducted on an oncology tissue panel demonstrated that 2208 mRNA expression was upregulated in breast and lung tumors when compared to their respective normal tissues.

[0708] Expression of 2208 mRNA in RNAi transfected cells was <5% of that seen in mock transfected controls.

[0709] Treatment of tumor cells with RNAi directed against 2208 mRNA results in varying levels of growth inhibition (72 hours post-transfection) in the following cell lines:

TABLE 6

| Cell Line | % Growth Inhibition |
|---|---|
| A549 | 37% (1 of 2 assays) |
| HCT116 | 46.4% (average, 2 of 3 assays) |
| HT29 | no inhibition |

[0710] Reduction of 2208 mRNA expression in tumor cells by transfection with siRNA oligos specific for that gene results in cell growth inhibition. RNAi studies in two different cell lines (A549 and HCT116) showed significant levels of growth inhibition coincident with reduction of 2208 mRNA expression. Small molecule inhibitors of 2208 would be expected to have a similar effect on tumor cell growth, and are therefore attractive cancer therapeutic candidates.

[0711] Due to 2208 function and expression, modulators of 2208 activity would be useful in treating human cancers, including but not limited to breast and lung cancers. 2208 polypeptides of the present invention are useful in screening for modulators of 2208 activity.

[0712] Gene ID 10252

[0713] The human 10252 sequence (SEQ ID NO:113), known also as Pyridoxine (or Pyridoxal) kinase, is approximately 960 nucleotides long including untranslated regions. The coding sequence, located at about nucleic acids 7 to 945 of SEQ ID NO:113, encodes a 312 amino acid protein (SEQ ID NO:114).

[0714] As assessed by TaqMan analysis, 10252 mRNA expression was increased approximately 10 fold in the pooled colon tumors relative to the pooled normal colons and 2.5 fold in pooled lung tumors relative to pooled normal lung. Other tissues expressing high 10252 mRNA levels included human umbilical vein endothelial cells (HUVEC), coronary smooth muscle cells, normal kidney, normal brain cortex and normal brain hypothalamus.

[0715] In an oncology TaqMan panel, 10252 mRNA expression was increased 4.5 and 5.5-fold in 3/5 breast tumors, 2-fold in 3/6 lung tumors, and 3-fold in 1/1 pooled colon to liver metastases relative to their respective normal controls. 10252 mRNA expression was also increased in 1/6 ovarian tumors when compared to normal ovarian tissue. 10252 mRNA was expressed at high levels in the human colorectal carcinoma cell line HCT116.

[0716] In an SVA colon polyp panel, 10252 mRNA expression was increased 3.5-fold in hyperplastic polyps, 2 to 3-fold in adenomas, and 2 to 4-fold in adenocarcinomas relative to normal colon samples.

[0717] In an expanded colon tumor panel, 10252 mRNA was expressed at increased levels in colon tumors and colon to liver metastases relative to normal colon samples.

[0718] In a colon metastases panel, 10252 mRNA expression was increased in colon tumors, colon to liver metastases and colon metastases to tissues other than the liver relative to normal colon samples. 10252 mRNA was expressed at low levels in normal liver.

[0719] In an expanded lung tumor panel, 10252 mRNA expression was increased in lung tumors relative to normal lungs and normal lung trachea.

[0720] In situ hybridization experiments conducted on 10252 indicated that primary lung (4/4) and colon (4/4) tumors are positive for the target as well as colon metastasis to the liver (3/3). The normal lung and colon tissue are slightly positive (above background), but are much lower and heterogeneous in expression.

[0721] RNAi studies in HCT116 and A549 cells showed variable levels of growth inhibition coincident with reduction of 10252 expression.

[0722] 10252 mRNA expression is increased in some colon and lung tumors. 10252 encodes a pyridoxine kinase. Pyridoxine kinase catalyzes the phosphorylation of vitamin B6 to its active form, pyridoxal 5′-phosphate (Journal of Biochemistry, 180(7):1814-21(1998); Mol Cells, 10(4):452-9 (2000)). Although a significant amount of data exists demonstrating that pharmacologic levels of vitamin B6 supplementation reduce tumor cell proliferation, little has been reported on the dependency of tumors on physiologic levels. One report demonstrated that several human tumors display a significant dependence on vitamin B6 for proliferation (Anticancer Research, 8(4):813-8 (1988)). Tumors expressing increased levels of 10252 may be dependent on its activity, making it an ideal target for anti-cancer drug design. Selective inhibition of 10252 may result in inhibition and/or reduction of tumor growth.

[0723] Due to 10252 function and expression, modulators of 10252 activity would be useful in treating human cancers, including but not limited to colon and lung cancers. 10252 polypeptides of the present invention are useful in screening for modulators of 10252 activity.

[0724] Gene ID 10302

[0725] The human 10302 sequence (SEQ ID NO:115), known also as serum paraoxonase/arylesterase 3 (PON 3), is approximately 1075 nucleotides long including untranslated regions. The coding sequence, located at about nucleic acids 1 to 1065 of SEQ ID NO:115, encodes a 354 amino acid protein (SEQ ID NO:116).

[0726] As assessed by TaqMan analysis, 10302 mRNA expression was upregulated in tumors of the breast (1/6), lung (2/6) and colon (1/5) when compared to their respective normal tissues. On an expanded lung tumor panel (largely adenocarcinomas), 10302 mRNA showed increased expression in 5/20 lung tumor samples when compared to normal lung tissues. On an expanded colon tumor panel, 10302 mRNA showed increased expression in 5/14 colon tumor samples when compared to normal colon tissue samples. 10302 mRNA showed increased expression in a Beas2B cell line (K10) transformed with mutant kras.

[0727] In situ hybridization experiments on 10302 indicated that 10302 is expressed in primary lung (4/5) and colon (2/3) tumors, as well as in colon metastasis to the liver (2/3). Normal tissues show little to no expression of the target.

[0728] 10302 is the human PON3 gene, a member of the paraoxonase family that has been shown to mitigate cellular damage caused by oxidative stress. 10302 appears to be upregulated in cells by expression of mutant kras. Transformation of 3T3 cells with kras has been shown to increase their resistance to oxidative stress by 10-fold (Biochem Biophys Res Commun. 229(3):739-45 (1996)).

[0729] Expression levels of 10302 are increased in tumor cells containing a constitutively active kras. This in turn allows increased tumor survival under conditions of oxidative stress.

[0730] Due to 10302 function and expression, modulators of 10302 activity would be useful in treating human cancers, including but not limited to breast, colon and lung cancers. 10302 polypeptides of the present invention are useful in screening for modulators of 10302 activity.

[0731] Gene ID 14218

[0732] The human 14218 sequence (SEQ ID NO:117), known also as serine/threonine kinase 17B or DAP kinase-related apoptosis-inducing protein kinase 2, is approximately 1627 nucleotides long including untranslated regions. The coding sequence, located at about nucleic acids 262 to 1380 of SEQ ID NO:117, encodes a 372 amino acid protein (SEQ ID NO:118).

[0733] As assessed by TaqMan analysis, 14218 mRNA showed broad tissue expression, with the highest expression in normal tonsil, lymph node, and osteoblasts. 14218 mRNA expression was upregulated in breast tumors and ovarian tumors when compared to their respective normal tissues.

[0734] Expression of 14218 mRNA in RNAi transfected cells was <35% of that seen in mock transfected controls.

[0735] Treatment of tumor cells with RNAi directed against 14218 mRNA results in varying levels of growth inhibition (72 hours post-transfection) in the following cell lines:

TABLE 7

| Cell Line | % Growth Inhibition |
|---|---|
| A549 | 42.9% (average, 2 assays) |

[0736] Reduction of 14218 mRNA expression in tumor cells by transfection with siRNA oligos specific for that gene results in cell growth inhibition. RNAi studies in A549 cells showed significant levels of growth inhibition coincident with reduction of 14218 expression. Small molecule inhibitors of 14218 would be expected to have a similar effect on tumor cell growth, and are therefore attractive cancer therapeutic candidates.

[0737] Due to 14218 function and expression, modulators of 14218 activity would be useful in treating human cancers, including but not limited to breast and ovarian cancers. 14218 polypeptides of the present invention are useful in screening for modulators of 14218 activity.

[0738] Gene ID 33877

[0739] The human 33877 sequence (SEQ ID NO:119), a glycosyl transferase, is approximately 2493 nucleotides long including untranslated regions. The coding sequence, located at about nucleic acids 402 to 2060 of SEQ ID NO:119, encodes a 552 amino acid protein (SEQ ID NO:120).

[0740] As assed by TaqMan analysis, 33877 mRNA showed restricted tissue expression with the highest normal tissue expression in brain cortex, neutrophils, and kidney. Further TaqMan experiments using an oncology panel demonstrated that 33877 mRNA expression was significantly upregulated in tumors of the breast (2/6), ovary (5/6), and lung (4/5) when compared to their respective normal tissues. On an expanded lung tumor TaqMan panel, 33877 mRNA showed increased expression in 20/35 samples when compared to normal lung tissues.

[0741] In situ hybridization experiments conducted on 33877 indicated that 33877 mRNA is expressed at various levels in primary lung (5/6) and ovarian tumors (2/3). Little to no expression was observed in normal tissues surveyed.

[0742] Tumor progression is often marked by altered patterns of glycoslylation, which is thought to contribute the invasive and metastatic properties of tumor cells. 33877 is a member of the GalNAC family of glycosyl transferases, which play a critical role in the regulation of cellular glycosylation patterns.

[0743] Overexpression of 33877 in tumor cells results in aberrant glycosylation and increased metastatic potential of those cells.

[0744] Due to 33877 function and expression, modulators of 33877 activity would be useful in treating human cancers, including but not limited to breast, lung and ovarian cancers. 33877 polypeptides of the present invention are useful in screening for modulators of 33877 activity.

[0745] Gene ID 10317

[0746] The human 10317 sequence (SEQ ID NO:121), known also as palmitoyl-protein thioesterase precursor (PPT1) or palmitoyl-protein hydrolase, is approximately 2287 nucleotides long including untranslated regions. The coding sequence, located at about nucleic acids 15 to 935 of SEQ ID NO:121, encodes a 306 amino acid protein (SEQ ID NO:122).

[0747] As assessed by TaqMan analysis, 10317 mRNA was expressed at higher levels in colon, lung, and breast tumors (single sample pools of 3 tumors) with respect to normal colon, lung, and breast (single sample pools of 3 tissue samples), respectively. 10317 mRNA was also highly expressed in human umbilical vein endothelial cells (HUVEC), brain cortex, hypothalamus and macrophages.

[0748] Further TaqMan analysis on an oncology tissue panel indicated that 10317 mRNA was expressed at increased levels in 2/6 breast, in 2/6 lung, and in 1/5 colon tumors when compared to their respective normal tissue samples (3/3 breast, 3/3 lung, 3/3 colon). 10317 mRNA was also expressed at increased levels in proliferating human microvascular endothelial cells (HMVEC) relative to arrested HMVEC.

[0749] TaqMan analysis of an angiogenesis panel (fetal vs. adult tissues) indicated that 10317 mRNA was expressed at increased levels in fetal kidney (2/2) relative to adult angiogenic tissue samples (24/24). TaqMan analysis using an additional angiogenesis panel (hemangiomas and necrotic and angiogenic tumors) indicated that 10317 mRNA was expressed at higher levels in 4/8 hemangiomas relative to 1/1 normal skin tissue samples. 10317 mRNA was also expressed at higher levels in necrotic tumors (1/3 breast, 3/3 colon, and 3/3 lung tumors) and in Wilm's tumor relative to normal controls (breast (1/1), colon (1/1), lung (1/1), and kidney (1/1)).

[0750] In an expanded lung tumor panel, 10317 mRNA was increased in 14/35 lung tumors when compared to 6/6 normal lung tissue samples.

[0751] In a colon ACA tumor panel, 10317 mRNA was increased in 3/15 colon primary tumors when compared to 5/6 normal colon tissue samples and in 3/5 colon tumor metastasis samples when compared to either 5/6 normal colon tissue samples or 6/6 normal liver tissue samples. In a colon tumor metastasis panel, 10317 mRNA was increased in 4/4 colon primary tumors when compared to 3/3 normal colon tissue samples and in 13/16 colon tumor metastasis to the liver when compared to either 3/3 normal colon tissue samples or 3/3 normal liver tissue samples. 10317 mRNA was also increased in 12/14 samples of colon tumor metastasis to other sites when compared to 3/3 normal colon tissue samples.

[0752] TaqMan analysis of 10317 mRNA expression in an “endothelial cell in vitro proliferation, arrest and tube formation” panel indicated increased expression in proliferating HUVEC (1/1) and lung HMVEC (3/3) when compared to arrested HUVEC (1/1) and lung HMVEC (3/3). 10317 mRNA expression is also increased in tube formation in HUVEC (5/9) and lung HMVEC (4/6) when compared to arrested HUVEC (1/1) and lung HMVEC (3/3).

[0753] In situ experiments conducted on 10317 indicated that 10317 mRNA was expressed in primary lung and breast tumors. Normal breast and lung tissue are essentially negative for this gene. A variety of angiogenic tissues such as fetal kidney, adrenal, and Wilm's tumor are positive for expression.

[0754] Didemnin B is a promising natural product whose efficacy may be strongly limited by its widespread toxicities. Aplidine provides evidence that its antitumor activity is not mechanistically linked to its cardiotoxicity. Antisense, knockout, overexpression and synthetic inhibitor studies are consistent with PPT1 being a key target of didemnin B antitumor activity. Inhibition of EF-1a cannot account for its activity. Palmitoylation and depalmitoylation have been demonstrated to affect the subcellular localization and activity of Ras. Inhibition of 10317 will prevent tumors from targeting the activity of important signaling molecules to key subcellular locations, resulting in dysregulation and apoptosis.

[0755] Due to 10317 function and expression, modulators of 10317 activity would be useful in treating human cancers, including but not limited to breast, colon and lung cancers, and tumor angiogenesis. 10317 polypeptides of the present invention are useful in screening for modulators of 10317 activity.

[0756] Gene ID 10485

[0757] The human 10485 sequence (SEQ ID NO:123), known also as selenide water dikinase 1, selenophosphate synthetase 1, or selenium donor protein 1, is approximately 1429 nucleotides long including untranslated regions. The coding sequence, located at about nucleic acids 69 to 1247 of SEQ ID NO:123, encodes a 392 amino acid protein (SEQ ID NO:124).

[0758] As assessed by TaqMan analysis, 10485 mRNA is expressed at a 4-fold increased level in a primary colon tumor pool when compared to a normal colon tissue pool. 10485 mRNA is also expressed at a 3-fold increased level in a primary lung tumor pool when compared to a normal lung tissue pool.

[0759] In an oncology TaqMan tissue panel, 10485 mRNA expression is increased 2 to 3-fold in primary breast tumor samples, 2 to 7-fold in lung tumor samples and 2 to 3-fold in primary colon tumors when compared to their respective normal samples. 10485 mRNA is expressed at 2-fold increased levels in a pooled colon to liver metastases sample when compared to a normal liver sample.

[0760] In the phosphotidylinositol 3-kinase (PI3Kinase) TaqMan panel, 10485 mRNA expression is decreased after 48 hours of treatment with ˜8× the EC 50 of the PI3Kinase in LNCaP (30 uM), MDA-MB-468 (115 uM), MCF Tet Off (30 uM) and NCI-H125 (150 uM) cancer cell lines. 10485 mRNA expression in LNCaP cells decreases 3 fold after 96 hours of treatment. 10485 mRNA expression in MDA-MB-468 cells decreases 3 fold after 48 hours of treatment. 10485 mRNA expression in MCF Tet Off cells decreases 2.6 fold after 48 hours of treatment. 10485 mRNA expression in NCI-H125 cells decreases 6 fold after 96 hours of treatment.

[0761] In an expanded lung cancer tissue panel, 10485 mRNA expression is increased 2 to 14-fold in primary lung tumor samples.

[0762] In a breast cancer cell model panel, 10485 mRNA shows increased expression in estrogen receptor positive vs. estrogen receptor negative cell lines ranging from 1.2 to 11-fold.

[0763] 10485, selenophosphate synthetase (human selenium donor protein), is a member of the airs (AIR synthase and relatives) class. This protein encodes an enzyme that synthesizes selenophosphate from selenide and ATP. Selenophosphate is the selenium donor used to synthesize selenocysteine, which is co-translationally incorporated into selenoproteins at in-frame UGA codons. This protein itself contains a selenocysteine residue in its predicted active site. (J. of Health Science; 46(6):399-404 (2000)).

[0764] 10485 is a human selenium donor protein that is increased in primary lung tumors and is decreased in PI3-kinase inhibited cell lines. Inhibiting 10485 would decrease selenophosphate levels, thereby decreasing the synthesis of an array of selenoproteins. Functionally important selenoproteins are involved in antioxidant defense systems, thyroid metabolism and immune function. Therefore, tumors may have increased requirements for selenoproteins and increased sensitivity to reduced selenoprotein levels.

[0765] Due to 10485 function and expression, modulators of 10485 activity would be useful in treating human cancers, including but not limited to breast, colon and lung cancers. 10485 polypeptides of the present invention are useful in screening for modulators of 10485 activity.

[0766] Gene ID 25964

[0767] The human 25964 sequence (SEQ ID NO:125), known also as 3 beta-hydroxy-delta 5-C27-steroid oxidoreductase, is approximately 1725 nucleotides long including untranslated regions. The coding sequence, located at about nucleic acids 281 to 1390 of SEQ ID NO:125, encodes a 369 amino acid protein (SEQ ID NO:126).

[0768] As assessed by TaqMan analysis, 25964 mRNA expression was increased 4.5-fold in pooled prostate tumors relative to pooled normal prostates. 25964 mRNA expression was also elevated 7-fold in pooled colon tumors relative to pooled normal colon. 25964 mRNA was also highly expressed in erythroid cells.

[0769] In an oncology TaqMan panel, 25964 mRNA expression was increased in 4/5 breast tumors (3.5 to 17-fold) relative to 3 normal breast samples; in 2/5 ovarian tumors (2 to 4-fold) relative to 3 normal ovary samples; and in 2/6 lung tumors (3.5 to 7-fold) relative to 3 normal lung samples.

[0770] In situ hybridization experiments conducted on 25964 confirmed the TaqMan data in that 5/9 ovarian, 3/4 breast, and 2/3 colon carcinomas were moderately positive for expression. Normal tissues, except for liver, are negative for this gene in all cases by both TaqMan and ISH. Normal liver is positive for 25964, however, the colon metastases are slightly more positive.

[0771] 25964 encodes 3 beta-hydroxy-delta 5-C27-steroid oxidoreductase, which is involved in bile acid biosynthesis. Overexpression of 25964 in tumors may suggest an increased dependence on this gene for cell transformation, proliferation and/or survival. Inhibition of 25964 may therefore result in an inhibition and/or reduction in tumor growth.

[0772] Due to 25964 function and expression, modulators of 25964 activity would be useful in treating human cancers, including but not limited to breast, colon, lung and ovarian cancers. 25964 polypeptides of the present invention are useful in screening for modulators of 25964 activity.

[0773] Gene ID 14815

[0774] The human 14815 sequence (SEQ ID NO:127), an uncharacterized kinase, is approximately 3919 nucleotides long including untranslated regions. The coding sequence, located at about nucleic acids 183 to 3530 of SEQ ID NO:127, encodes a 1115 amino acid protein (SEQ ID NO:128).

[0775] As assessed by TaqMan analysis, 14815 mRNA demonstrated very restricted expression in normal tissues with the highest expression found in CNS tissue samples. Additional TaqMan experiments using a panel composed of normal and clinical tumor samples showed that 14815 mRNA was upregulated in breast tumors as compared to normal breast cancer samples. Low expression levels were detected in other tumor types tested.

[0776] Expression of 14815 in RNAi transfected cells was <50% of that seen in mock transfected controls.

[0777] Treatment of tumor cells with RNAi directed against 14815 results in varying levels of growth inhibition (72 hours post-transfection) in the following cell lines:

TABLE 8

| Cell Line | % Growth Inhibition |
|---|---|
| A549 | 54% (2 of 2 assays) |
| HCT116 | 35% (average, 2 of 3 assays) |
| HT29 | 42% (PLK only 23%) |

[0778] Reduction of 14815 expression in tumor cells by transfection with siRNA oligos specific for that gene results in cell growth inhibition. RNAi studies in 3 different cell lines (A549, HT29, and HCT116) showed significant levels of growth inhibition coincident with reduction of 14815 expression. Small molecule inhibitors of 14815 would be expected to have a similar effect on tumor cell growth, and are therefore attractive cancer therapeutic candidates.

[0779] Due to 14815 function and expression, modulators of 14815 activity would be useful in treating human cancers, including but not limited to breast cancers. 14815 polypeptides of the present invention are useful in screening for modulators of 14815 activity.

[0780] Gene ID 1363

[0781] The human 1363 sequence (SEQ ID NO:129), known also as human Beta-adrenergic receptor kinase 1 (ARK1), is approximately 3136 nucleotides long including untranslated regions. The coding sequence, located at about nucleic acids 108 to 2177 of SEQ ID NO:129, encodes a 689 amino acid protein (SEQ ID NO:130).

[0782] As assessed by TaqMan analysis, 1363 mRNA demonstrated broad tissue expression with the highest expression levels observed in normal brain cortex, neutrophils, and monocyte progenitors. Additional TaqMan experiments using a panel composed of normal and clinical tumor samples showed that 1363 mRNA expression was upregulated in 2/6 breast tumors, in 2/6 ovarian tumors, in 4/6 lung tumors, and in 1/1 colon-to-liver metastases as compared to their respective normal tissues.

[0783] In situ hybridization experiments conducted on 1363 indicated that 1363 is expressed in 3/3 primary colon and in 4/4 lung tumors as well as in 1/2 colon metastasis to the liver. Primary lung tumors are modestly positive compared to colon primary tumors, which highly express 1363. Metastatic colon carcinoma highly expresses 1363 as well. Normal colon and lung epithelium show little to no expression.

[0784] Expression of 1363 in RNAi transfected cells was 30% of that seen in mock transfected controls.

[0785] Treatment of tumor cells with RNAi directed against 1363 results in varying levels of growth inhibition (72 hours post-transfection) in the following cell lines:

TABLE 9

| Cell Line | % Growth Inhibition |
|---|---|
| A549 | 55% |
| HCT116 | 57% |

[0786] RNAi studies in A549 and HCT116 cells showed significant levels of growth inhibition coincident with reduction of 1363 expression. Small molecule inhibitors of 1363 would be expected to have an effect similar to that seen with RNAi on tumor cell growth, and are therefore attractive cancer therapeutic candidates.

[0787] Due to 1363 function and expression, modulators of 1363 activity would be useful in treating human cancers, including but not limited to breast, ovarian, colon and lung cancers. 1363 polypeptides of the present invention are useful in screening for modulators of 1363 activity.

[0788] Gene ID 1397

[0789] The human 1397 sequence (SEQ ID NO:131), known also as human protein kinase CLK2, is approximately 1973 nucleotides long including untranslated regions. The coding sequence, located at about nucleic acids 130 to 1629 of SEQ ID NO:131, encodes a 499 amino acid protein (SEQ ID NO:132).

[0790] As assessed by TaqMan analysis, 1397 mRNA demonstrated broad tissue expression with the highest level of expression found in normal brain cortex and erythroid cells. Additional TaqMan experiments using a panel composed of normal and clinical tumor samples showed that 1397 mRNA expression was upregulated in 2/6 breast tumors, in 2/6 ovarian tumors, in 4/6 lung tumors, and in 4/5 colon tumors as compared their respective normal tissues.

[0791] In situ hybridization experiments conducted on 1397 indicated that 1397 is expressed in 3/3 primary breast, in 1/2 colon, and in 4/4 lung tumors. Some expression was seen in normal lung and breast tissue, but not to the extent seen in tumor. Normal colon epithelium is negative, but some sticky IFL were seen in the antisense and sense control.

[0792] Expression of 1397 in RNAi transfected cells was <60% of that seen in mock transfected controls.

[0793] Treatment of tumor cells with RNAi directed against 1397 results in varying levels of growth inhibition (72 hours post-transfection) in the following cell lines:

TABLE 10

| Cell Line | % Growth Inhibition |
|---|---|
| A549 | 57% |
| HCT116 | 44% |

[0794] RNAi studies in A549 and HCT116 cells showed significant levels of growth inhibition coincident with reduction of 1397 expression. Small molecule inhibitors of 1397 would be expected to have an effect similar to that seen with RNAi on tumor cell growth, and are therefore attractive cancer therapeutic candidates.

[0795] Due to 1397 function and expression, modulators of 1397 activity would be useful in treating human cancers, including but not limited to breast, ovarian, colon and lung cancers. 1397 polypeptides of the present invention are useful in screening for modulators of 1397 activity.

[0796] Gene ID 14827

[0797] The human 14827 sequence (SEQ ID NO:133), known also as human STE20/SPS1-related proline-alanine rich protein kinase (SPAK), is approximately 3293 nucleotides long including untranslated regions. The coding sequence, located at about nucleic acids 174 to 1817 of SEQ ID NO:133, encodes a 547 amino acid protein (SEQ ID NO:134).

[0798] As assessed by TaqMan analysis, 14827 mRNA demonstrated broad tissue expression with the highest level of expression in normal pituitary gland and bladder tissue samples. Additional TaqMan experiments using a panel composed of normal and clinical tumor samples showed that 14827 mRNA expression was upregulated in 4/6 lung tumors and in 4/4 colon tumors as compared to their respective normal tissues.

[0799] In situ hybridization experiments conducted on 14827 indicated that 14827 is very positive in 5/5 primary tumors of the lung and in 3/3 colon tumors, as well as in 2/2 colon metastasis to the liver. No expression was seen in normal lung or colon epithelium. Some sticky IFL was seen in the T3 and T7 for normal colon.

[0800] Expression of 14827 in RNAi transfected cells was <15% of that seen in mock transfected controls.

[0801] Treatment of tumor cells with RNAi directed against 14827 results in varying levels of growth inhibition (72 hours post-transfection) in the following cell lines:

TABLE 11

| Cell Line | % Growth Inhibition |
|---|---|
| A549 | 59% |
| HCT116 | 44% |

[0802] RNAi studies in A549 and HCT116 cells showed significant levels of growth inhibition coincident with reduction of 14827 expression. Small molecule inhibitors of 14827 would be expected to have an effect similar to that seen with RNAi on tumor cell growth, and are therefore attractive cancer therapeutic candidates.

[0803] Due to 14827 function and expression, modulators of 14827 activity would be useful in treating human cancers, including but not limited to colon and lung cancers. 14827 polypeptides of the present invention are useful in screening for modulators of 14827 activity.

[0804] Gene ID 21708

[0805] The human 21708 sequence (SEQ ID NO:135), known also as MAST205, is approximately 5737 nucleotides long including untranslated regions. The coding sequence, located at about nucleic acids 284 to 5488 of SEQ ID NO:135, encodes a 1734 amino acid protein (SEQ ID NO:136).

[0806] As assessed by TaqMan analysis, 21708 mRNA demonstrated broad tissue expression with the highest level of expression in normal skeletal muscle, heart, and brain cortex. Additional TaqMan experiments using a panel composed of normal and clinical tumor samples showed that 21708 mRNA expression was upregulated in 2/6 breast tumors and in 2/6 lung tumors as compared to their respective normal tissues.

[0807] In situ hybridization experiments conducted on 21708 indicated that 21708 is highly expressed in 5/5 primary lung and in 3/3 colon tumors, and in 3/3 colon metastases to the liver. Normal lung was negative. Normal colon epithelium was modestly positive, but less so that primary tumor. Normal lung epithelium was negative.

[0808] Expression of 21708 in RNAi transfected cells was <25% of that seen in mock transfected controls.

[0809] Treatment of tumor cells with RNAi directed against 21708 results in varying levels of growth inhibition (72 hours post-transfection) in the following cell lines:

TABLE 12

| Cell Line | % Growth Inhibition |
|---|---|
| A549 | 47% |
| HCT116 | 64% |

[0810] RNAi studies in A549 and HCT116 cells showed significant levels of growth inhibition coincident with reduction of 21708 expression. Small molecule inhibitors of 21708 would be expected to have an effect similar to that seen with RNAi on tumor cell growth, and are therefore attractive cancer therapeutic candidates.

[0811] Due to 21708 function and expression, modulators of 21708 activity would be useful in treating human cancers, including but not limited to breast and lung cancers. 21708 polypeptides of the present invention are useful in screening for modulators of 21708 activity.

[0812] Gene ID 3801

[0813] The human 3801 sequence (SEQ ID NO:137), which is known as human dual specificity mitogen-activated protein kinase kinase 5 (MPK5), is approximately 2083 nucleotides long including untranslated regions. The partial coding sequence, located at about nucleic acids 297 to 1613 of SEQ ID NO:137, encodes a 438 amino acid protein (SEQ ID NO:138).

[0814] As assessed by TaqMan analysis, 3801 mRNA demonstrated broad tissue expression with the highest level of expression in normal skeletal muscle and brain cortex. Additional TaqMan experiments using a panel composed of normal and clinical tumor samples showed that 3801 mRNA expression was upregulated in 6/6 lung tumors and in 2/5 colon tumors as compared to their respective normal tissues.

[0815] In situ hybridization experiments conducted on 3801 indicated that 3801 is expressed in 6/6 preliminary lung and in 4/4 colon carcinoma. 3801 mRNA is also expressed very highly in 3/3 colon metastases to the liver. Normal tissues were negative for expression in epithelial cells.

[0816] Expression of 3801 in RNAi transfected cells was <30% of that seen in mock transfected controls.

[0817] Treatment of tumor cells with RNAi directed against 3801 results in varying levels of growth inhibition (72 hours post-transfection) in the following cell lines:

TABLE 13

| Cell Line | % Growth Inhibition |
|---|---|
| A549 | 43% |
| HCT116 | 58% |

[0818] RNAi studies in A549 and HCT116 cells showed significant levels of growth inhibition coincident with reduction of 3801 expression. Small molecule inhibitors of 3801 would be expected to have an effect similar to that seen with RNAi on tumor cell growth, and are therefore attractive cancer therapeutic candidates.

[0819] Due to 3801 function and expression, modulators of 3801 activity would be useful in treating human cancers, including but not limited to colon and lung cancers. 3801 polypeptides of the present invention are useful in screening for modulators of 3801 activity.

[0820] Gene ID 64698

[0821] The human 64698 sequence (SEQ ID NO:139), known also as human sphingosine kinase 2 (SPH2), is approximately 2380 nucleotides long including untranslated regions. The coding sequence, located at about nucleic acids 7 to 1863 of SEQ ID NO:139, encodes a 618 amino acid protein (SEQ ID NO:140).

[0822] As assessed by TaqMan analysis, 64698 mRNA demonstrated broad tissue expression with the highest level of expression in normal hypothalamus, brain cortex, and erythroid cells. Additional TaqMan experiments using a panel composed of normal and clinical tumor samples showed that 64698 mRNA expression was upregulated in 2/6 breast tumors, in 6/6 lung tumors and in 1/5 colon tumors as compared to their respective normal tissues.

[0823] In situ hybridization experiments conducted on 64698 showed expression of 64698 in 4/4 primary breast tumors, in 5/6 lung tumors, and in 5/5 colon tumors as well as in 3/4 colon metastases to the liver. While expression was variable, most samples showed expression. Some background was seen in infiltrating lymphocytes in lung tissue and in colon tissue. Normal tissues showed some expression, most notably breast and lung tissues. This is consistent with the TaqMan data. Normal colon was negative, but showed sticky IFL in both the sense and antisense slides.

[0824] Expression of 64698 in RNAi transfected cells was <35% of that seen in mock transfected controls.

[0825] Treatment of tumor cells with RNAi directed against 64698 results in varying levels of growth inhibition (72 hours post-transfection) in the following cell lines:

TABLE 14

| Cell Line | % Growth Inhibition |
|---|---|
| A549 | 53% |
| HCT116 | 49% |

[0826] RNAi studies in A549 and HCT116 cells showed significant levels of growth inhibition coincident with reduction of 64698 expression. Small molecule inhibitors of 64698 would be expected to have an effect similar to that seen with RNAi on tumor cell growth, and are therefore attractive cancer therapeutic candidates.

[0827] Due to 64698 function and expression, modulators of 64698 activity would be useful in treating human cancers, including but not limited to breast, colon and lung cancers. 64698 polypeptides of the present invention are useful in screening for modulators of 64698 activity.

[0828] Gene ID 2179

[0829] The human 2179 sequence (SEQ ID NO:141), known also as MOK protein kinase, is approximately 1954 nucleotides long including untranslated regions. The coding sequence, located at about nucleic acids 227 to 1486 of SEQ ID NO:141, encodes a 419 amino acid protein (SEQ ID NO:142).

[0830] As assessed by TaqMan analysis using a normal human tissue panel, 2179 mRNA was broadly expressed in normal tissues with the highest expression level observed in normal brain cortex tissue samples. TaqMan experiments performed using a human oncology tissue panel demonstrated that 2179 mRNA expression was upregulated in 2/5 breast tumors, in 1/6 ovarian tumors, in 4/6 lung tumors and in 2/5 colon tumors as compared to their respective normal tissues.

[0831] Expression of 2179 in RNAi transfected cells was <50% of that seen in mock transfected controls.

[0832] Treatment of tumor cells with RNAi directed against 2179 results in varying levels of growth inhibition (72 hours post-transfection) in the following cell lines:

TABLE 15

| Cell Line | % Growth Inhibition |
|---|---|
| HCT116 | 50% |

[0833] Deconvolution experiments in HCT116 cells at 72 h resulted in greater than 55% inhibition of growth in 75% (3/4) of transfected cells.

[0834] RNAi studies performed using HCT116 cells showed significant levels of growth inhibition coincident with reduction of 2179 expression. Small molecule inhibitors of 2179 would be attractive cancer therapeutic candidates as they would have an effect similar to that seen with RNAi on tumor cell growth.

[0835] Due to 2179 function and expression, modulators of 2179 activity would be useful in treating human cancers, including but not limited to breast, ovarian, colon and lung cancers, and tumor angiogenesis. 2179 polypeptides of the present invention are useful in screening for modulators of 2179 activity.

[0836] Gene ID 13249

[0837] The human 13249 sequence (SEQ ID NO:143), known also as STE20 like kinase, is approximately 3032 nucleotides long including untranslated regions. The coding sequence, located at about nucleic acids 296 to 2992 of SEQ ID NO:143, encodes a 898 amino acid protein (SEQ ID NO:144).

[0838] As assessed by TaqMan analysis using a normal human tissue panel, 13249 mRNA was broadly expressed in normal tissues with the highest expression level observed in normal brain cortex tissue samples. TaqMan experiments performed using a human oncology tissue panel demonstrated that 13249 mRNA expression was upregulated in 1/6 breast tumors, in 1/6 lung tumors and in 2/5 colon tumors as compared to their respective normal tissues.

[0839] Expression of 13249 in RNAi transfected cells was <5% of that seen in mock transfected controls.

[0840] Treatment of tumor cells with RNAi directed against 13249 results in varying levels of growth inhibition (72 hours post-transfection) in the following cell lines:

TABLE 16

| Cell Line | % Growth Inhibition |
|---|---|
| HCT116 | 51% |

[0841] Deconvolution experiments in HCT116 cells at 72 h resulted in greater than 60% inhibition of growth in 100% (4/4) of transfected cells.

[0842] RNAi studies in HCT116 cells showed significant levels of growth inhibition coincident with reduction of 13249 expression. Small molecule inhibitors of 13249 would be attractive cancer therapeutic candidates as they would have an effect similar to that seen with RNAi on tumor cell growth.

[0843] Due to 13249 function and expression, modulators of 13249 activity would be useful in treating human cancers, including but not limited to breast, ovarian, colon and lung cancers and tumor angiogenesis. 13249 polypeptides of the present invention are useful in screening for modulators of 13249 activity.

[0844] Various aspects of the invention are described in further detail in the following subsections:

[0845] Screening Assays:

[0846] The invention provides a method (also referred to herein as a “screening assay”) for identifying modulators, i.e., candidate or test compounds or agents (e.g., peptides, peptidomimetics, small molecules (organic or inorganic) or other drugs) which bind to 15986, 2188, 20743, 9148, 9151, 9791, 44252, 14184, 42461, 8204, 7970, 25552, 21657, 26492, 2411, 15088, 1905, 28899, 63380, 33935, 10480, 12686, 25501, 17694, 15701, 53062, 49908, 21612, 38949, 6216, 46863, 9235, 2201, 6985, 9883, 12238, 18057, 21617, 39228, 49928, 54476, 62113, 64316, 12264, 32362, 58198, 2887, 3205, 8557, 9600, 9693, 44867, 53058, 55556, 57658, 2208, 10252, 10302, 14218, 33877, 10317, 10485, 25964, 14815, 1363, 1397, 14827, 21708, 3801, 64698, 2179 or 13249 proteins, have a stimulatory or inhibitory effect on, for example, 15986, 2188, 20743, 9148, 9151, 9791, 44252, 14184, 42461, 8204, 7970, 25552, 21657, 26492, 2411, 15088, 1905, 28899, 63380, 33935, 10480, 12686, 25501, 17694, 15701, 53062, 49908, 21612, 38949, 6216, 46863, 9235, 2201, 6985, 9883, 12238, 18057, 21617, 39228, 49928, 54476, 62113, 64316, 12264, 32362, 58198, 2887, 3205, 8557, 9600, 9693, 44867, 53058, 55556, 57658, 2208, 10252, 10302, 14218, 33877, 10317, 10485, 25964, 14815, 1363, 1397, 14827, 21708, 3801, 64698, 2179 or 13249 expression or 15986, 2188, 20743, 9148, 9151, 9791, 44252, 14184, 42461, 8204, 7970, 25552, 21657, 26492, 2411, 15088, 1905, 28899, 63380, 33935, 10480, 12686, 25501, 17694, 15701, 53062, 49908, 21612, 38949, 6216, 46863, 9235, 2201, 6985, 9883, 12238, 18057, 21617, 39228, 49928, 54476, 62113, 64316, 12264, 32362, 58198, 2887, 3205, 8557, 9600, 9693, 44867, 53058, 55556, 57658, 2208, 10252, 10302, 14218, 33877, 10317, 10485, 25964, 14815, 1363, 1397, 14827, 21708, 3801, 64698, 2179 or 13249 activity, or have a stimulatory or inhibitory effect on, for example, the expression or activity of a 15986, 2188, 20743, 9148, 9151, 9791, 44252, 14184, 42461, 8204, 7970, 25552, 21657, 26492, 2411, 15088, 1905, 28899, 63380, 33935, 10480, 12686, 25501, 17694, 15701, 53062, 49908, 21612, 38949, 6216, 46863, 9235, 2201, 6985, 9883, 12238, 18057, 21617, 39228, 49928, 54476, 62113, 64316, 12264, 32362, 58198, 2887, 3205, 8557, 9600, 9693, 44867, 53058, 55556, 57658, 2208, 10252, 10302, 14218, 33877, 10317, 10485, 25964, 14815, 1363, 1397, 14827, 21708, 3801, 64698, 2179 or 13249 substrate. Compounds identified using the assays described herein may be useful for treating a cancer.

[0847] These assays are designed to identify compounds that bind to a 15986, 2188, 20743, 9148, 9151, 9791, 44252, 14184, 42461, 8204, 7970, 25552, 21657, 26492, 2411, 15088, 1905, 28899, 63380, 33935, 10480, 12686, 25501, 17694, 15701, 53062, 49908, 21612, 38949, 6216, 46863, 9235, 2201, 6985, 9883, 12238, 18057, 21617, 39228, 49928, 54476, 62113, 64316, 12264, 32362, 58198, 2887, 3205, 8557, 9600, 9693, 44867, 53058, 55556, 57658, 2208, 10252, 10302, 14218, 33877, 10317, 10485, 25964, 14815, 1363, 1397, 14827, 21708, 3801, 64698, 2179 or 13249 protein, bind to other intracellular or extracellular proteins that interact with a 15986, 2188, 20743, 9148, 9151, 9791, 44252, 14184, 42461, 8204, 7970, 25552, 21657, 26492, 2411, 15088, 1905, 28899, 63380, 33935, 10480, 12686, 25501, 17694, 15701, 53062, 49908, 21612, 38949, 6216, 46863, 9235, 2201, 6985, 9883, 12238, 18057, 21617, 39228, 49928, 54476, 62113, 64316, 12264, 32362, 58198, 2887, 3205, 8557, 9600, 9693, 44867, 53058, 55556, 57658, 2208, 10252, 10302, 14218, 33877, 10317, 10485, 25964, 14815, 1363, 1397, 14827, 21708, 3801, 64698, 2179 or 13249 protein, and interfere with the interaction of the 15986, 2188, 20743, 9148, 9151, 9791, 44252, 14184, 42461, 8204, 7970, 25552, 21657, 26492, 2411, 15088, 1905, 28899, 63380, 33935, 10480, 12686, 25501, 17694, 15701, 53062, 49908, 21612, 38949, 6216, 46863, 9235, 2201, 6985, 9883, 12238, 18057, 21617, 39228, 49928, 54476, 62113, 64316, 12264, 32362, 58198, 2887, 3205, 8557, 9600, 9693, 44867, 53058, 55556, 57658, 2208, 10252, 10302, 14218, 33877, 10317, 10485, 25964, 14815, 1363, 1397, 14827, 21708, 3801, 64698, 2179 or 13249 protein with other intercellular or extracellular proteins. For example, in the case of the 15986, 2188, 20743, 9148, 9151, 9791, 44252, 14184, 42461, 8204, 7970, 25552, 21657, 26492, 2411, 15088, 1905, 28899, 63380, 33935, 10480, 12686, 25501, 17694, 15701, 53062, 49908, 21612, 38949, 6216, 46863, 9235, 2201, 6985, 9883, 12238, 18057, 21617, 39228, 49928, 54476, 62113, 64316, 12264, 32362, 58198, 2887, 3205, 8557, 9600, 9693, 44867, 53058, 55556, 57658, 2208, 10252, 10302, 14218, 33877, 10317, 10485, 25964, 14815, 1363, 1397, 14827, 21708, 3801, 64698, 2179 or 13249 protein, which is a transmembrane receptor-type protein, such techniques can identify ligands for such a receptor. A 15986, 2188, 20743, 9148, 9151, 9791, 44252, 14184, 42461, 8204, 7970, 25552, 21657, 26492, 2411, 15088, 1905, 28899, 63380, 33935, 10480, 12686, 25501, 17694, 15701, 53062, 49908, 21612, 38949, 6216, 46863, 9235, 2201, 6985, 9883, 12238, 18057, 21617, 39228, 49928, 54476, 62113, 64316, 12264, 32362, 58198, 2887, 3205, 8557, 9600, 9693, 44867, 53058, 55556, 57658, 2208, 10252, 10302, 14218, 33877, 10317, 10485, 25964, 14815, 1363, 1397, 14827, 21708, 3801, 64698, 2179 or 13249 protein ligand or substrate can, for example, be used to ameliorate at least one symptom of a cancer. Such compounds may include, but are not limited small molecules, peptides, antibodies, ribozymes, gene therapy vectors and antisense oligonucleotides. Such compounds may also include other cellular proteins.

[0848] Compounds identified via assays such as those described herein may be useful, for example, for treating a cancer. In instances whereby a cancer condition results from an overall lower level of 15986, 2188, 20743, 9148, 9151, 9791, 44252, 14184, 42461, 8204, 7970, 25552, 21657, 26492, 2411, 15088, 1905, 28899, 63380, 33935, 10480, 12686, 25501, 17694, 15701, 53062, 49908, 21612, 38949, 6216, 46863, 9235, 2201, 6985, 9883, 12238, 18057, 21617, 39228, 49928, 54476, 62113, 64316, 12264, 32362, 58198, 2887, 3205, 8557, 9600, 9693, 44867, 53058, 55556, 57658, 2208, 10252, 10302, 14218, 33877, 10317, 10485, 25964, 14815, 1363, 1397, 14827, 21708, 3801, 64698, 2179 or 13249 gene expression and/or 15986, 2188, 20743, 9148, 9151, 9791, 44252, 14184, 42461, 8204, 7970, 25552, 21657, 26492, 2411, 15088, 1905, 28899, 63380, 33935, 10480, 12686, 25501, 17694, 15701, 53062, 49908, 21612, 38949, 6216, 46863, 9235, 2201, 6985, 9883, 12238, 18057, 21617, 39228, 49928, 54476, 62113, 64316, 12264, 32362, 58198, 2887, 3205, 8557, 9600, 9693, 44867, 53058, 55556, 57658, 2208, 10252, 10302, 14218, 33877, 10317, 10485, 25964, 14815, 1363, 1397, 14827, 21708, 3801, 64698, 2179 or 13249 protein in a cell or tissue, compounds that interact with the 15986, 2188, 20743, 9148, 9151, 9791, 44252, 14184, 42461, 8204, 7970, 25552, 21657, 26492, 2411, 15088, 1905, 28899, 63380, 33935, 10480, 12686, 25501, 17694, 15701, 53062, 49908, 21612, 38949, 6216, 46863, 9235, 2201, 6985, 9883, 12238, 18057, 21617, 39228, 49928, 54476, 62113, 64316, 12264, 32362, 58198, 2887, 3205, 8557, 9600, 9693, 44867, 53058, 55556, 57658, 2208, 10252, 10302, 14218, 33877, 10317, 10485, 25964, 14815, 1363, 1397, 14827, 21708, 3801, 64698, 2179 or 13249 protein may include compounds which accentuate or amplify the activity of the bound 15986, 2188, 20743, 9148, 9151, 9791, 44252, 14184, 42461, 8204, 7970, 25552, 21657, 26492, 2411, 15088, 1905, 28899, 63380, 33935, 10480, 12686, 25501, 17694, 15701, 53062, 49908, 21612, 38949, 6216, 46863, 9235, 2201, 6985, 9883, 12238, 18057, 21617, 39228, 49928, 54476, 62113, 64316, 12264, 32362, 58198, 2887, 3205, 8557, 9600, 9693, 44867, 53058, 55556, 57658, 2208, 10252, 10302, 14218, 33877, 10317, 10485, 25964, 14815, 1363, 1397, 14827, 21708, 3801, 64698, 2179 or 13249 protein. Such compounds would bring about an effective increase in the level of 15986, 2188, 20743, 9148, 9151, 9791, 44252, 14184, 42461, 8204, 7970, 25552, 21657, 26492, 2411, 15088, 1905, 28899, 63380, 33935, 10480, 12686, 25501, 17694, 15701, 53062, 49908, 21612, 38949, 6216, 46863, 9235, 2201, 6985, 9883, 12238, 18057, 21617, 39228, 49928, 54476, 62113, 64316, 12264, 32362, 58198, 2887, 3205, 8557, 9600, 9693, 44867, 53058, 55556, 57658, 2208, 10252, 10302, 14218, 33877, 10317, 10485, 25964, 14815, 1363, 1397, 14827, 21708, 3801, 64698, 2179 or 13249 protein activity, thus ameliorating symptoms.

[0849] In other instances, mutations within the 15986, 2188, 20743, 9148, 9151, 9791, 44252, 14184, 42461, 8204, 7970, 25552, 21657, 26492, 2411, 15088, 1905, 28899, 63380, 33935, 10480, 12686, 25501, 17694, 15701, 53062, 49908, 21612, 38949, 6216, 46863, 9235, 2201, 6985, 9883, 12238, 18057, 21617, 39228, 49928, 54476, 62113, 64316, 12264, 32362, 58198, 2887, 3205, 8557, 9600, 9693, 44867, 53058, 55556, 57658, 2208, 10252, 10302, 14218, 33877, 10317, 10485, 25964, 14815, 1363, 1397, 14827, 21708, 3801, 64698, 2179 or 13249 gene may cause aberrant types or excessive amounts of 15986, 2188, 20743, 9148, 9151, 9791, 44252, 14184, 42461, 8204, 7970, 25552, 21657, 26492, 2411, 15088, 1905, 28899, 63380, 33935, 10480, 12686, 25501, 17694, 15701, 53062, 49908, 21612, 38949, 6216, 46863, 9235, 2201, 6985, 9883, 12238, 18057, 21617, 39228, 49928, 54476, 62113, 64316, 12264, 32362, 58198, 2887, 3205, 8557, 9600, 9693, 44867, 53058, 55556, 57658, 2208, 10252, 10302, 14218, 33877, 10317, 10485, 25964, 14815, 1363, 1397, 14827, 21708, 3801, 64698, 2179 or 13249 proteins to be made which have a deleterious effect that leads to a cancer. Similarly, physiological conditions may cause an excessive increase in 15986, 2188, 20743, 9148, 9151, 9791, 44252, 14184, 42461, 8204, 7970, 25552, 21657, 26492, 2411, 15088, 1905, 28899, 63380, 33935, 10480, 12686, 25501, 17694, 15701, 53062, 49908, 21612, 38949, 6216, 46863, 9235, 2201, 6985, 9883, 12238, 18057, 21617, 39228, 49928, 54476, 62113, 64316, 12264, 32362, 58198, 2887, 3205, 8557, 9600, 9693, 44867, 53058, 55556, 57658, 2208, 10252, 10302, 14218, 33877, 10317, 10485, 25964, 14815, 1363, 1397, 14827, 21708, 3801, 64698, 2179 or 13249 gene expression leading to a cancer. In such cases, compounds that bind to a 15986, 2188, 20743, 9148, 9151, 9791, 44252, 14184, 42461, 8204, 7970, 25552, 21657, 26492, 2411, 15088, 1905, 28899, 63380, 33935, 10480, 12686, 25501, 17694, 15701, 53062, 49908, 21612, 38949, 6216, 46863, 9235, 2201, 6985, 9883, 12238, 18057, 21617, 39228, 49928, 54476, 62113, 64316, 12264, 32362, 58198, 2887, 3205, 8557, 9600, 9693, 44867, 53058, 55556, 57658, 2208, 10252, 10302, 14218, 33877, 10317, 10485, 25964, 14815, 1363, 1397, 14827, 21708, 3801, 64698, 2179 or 13249 protein may be identified that inhibit the activity of the 15986, 2188, 20743, 9148, 9151, 9791, 44252, 14184, 42461, 8204, 7970, 25552, 21657, 26492, 2411, 15088, 1905, 28899, 63380, 33935, 10480, 12686, 25501, 17694, 15701, 53062, 49908, 21612, 38949, 6216, 46863, 9235, 2201, 6985, 9883, 12238, 18057, 21617, 39228, 49928, 54476, 62113, 64316, 12264, 32362, 58198, 2887, 3205, 8557, 9600, 9693, 44867, 53058, 55556, 57658, 2208, 10252, 10302, 14218, 33877, 10317, 10485, 25964, 14815, 1363, 1397, 14827, 21708, 3801, 64698, 2179 or 13249 protein. Assays for testing the effectiveness of compounds identified by techniques such as those described in this section are discussed herein.

[0850] In one embodiment, the invention provides assays for screening candidate or test compounds which are substrates of a 15986, 2188, 20743, 9148, 9151, 9791, 44252, 14184, 42461, 8204, 7970, 25552, 21657, 26492, 2411, 15088, 1905, 28899, 63380, 33935, 10480, 12686, 25501, 17694, 15701, 53062, 49908, 21612, 38949, 6216, 46863, 9235, 2201, 6985, 9883, 12238, 18057, 21617, 39228, 49928, 54476, 62113, 64316, 12264, 32362, 58198, 2887, 3205, 8557, 9600, 9693, 44867, 53058, 55556, 57658, 2208, 10252, 10302, 14218, 33877, 10317, 10485, 25964, 14815, 1363, 1397, 14827, 21708, 3801, 64698, 2179 or 13249 protein or polypeptide or biologically active portion thereof. In another embodiment, the invention provides assays for screening candidate or test compounds which bind to or modulate the activity of a 15986, 2188, 20743, 9148, 9151, 9791, 44252, 14184, 42461, 8204, 7970, 25552, 21657, 26492, 2411, 15088, 1905, 28899, 63380, 33935, 10480, 12686, 25501, 17694, 15701, 53062, 49908, 21612, 38949, 6216, 46863, 9235, 2201, 6985, 9883, 12238, 18057, 21617, 39228, 49928, 54476, 62113, 64316, 12264, 32362, 58198, 2887, 3205, 8557, 9600, 9693, 44867, 53058, 55556, 57658, 2208, 10252, 10302, 14218, 33877, 10317, 10485, 25964, 14815, 1363, 1397, 14827, 21708, 3801, 64698, 2179 or 13249 protein or polypeptide or biologically active portion thereof. The test compounds of the present invention can be obtained using any of the numerous approaches in combinatorial library methods known in the art, including: biological libraries; spatially addressable parallel solid phase or solution phase libraries; synthetic library methods requiring deconvolution; the ‘one-bead one-compound’ library method; and synthetic library methods using affinity chromatography selection. The biological library approach is limited to peptide libraries, while the other four approaches are applicable to peptide, non-peptide oligomer or small molecule libraries of compounds (Lam, K. S. (1997) Anticancer Drug Des. 12:145).

[0851] Examples of methods for the synthesis of molecular libraries can be found in the art, for example in: DeWitt et al. (1993) Proc. Natl. Acad. Sci. U.S.A. 90:6909; Erb et al. (1994) Proc. Natl. Acad. Sci. USA 91:11422; Zuckermann et al. (1994). J. Med. Chem. 37:2678; Cho et al. (1993) Science 261:1303; Carrell et al. (1994) Angew. Chem. Int. Ed. Engl. 33:2059; Carell et al. (1994) Angew. Chem. Int. Ed. Engl. 33:2061; and in Gallop et al. (1994) J. Med. Chem. 37:1233.

[0852] Libraries of compounds may be presented in solution (e.g., Houghten (1992) Biotechniques 13:412-421), or on beads (Lam (1991) Nature 354:82-84), chips (Fodor (1993) Nature 364:555-556), bacteria (Ladner U.S. Pat. No. 5,223,409), spores (Ladner U.S. Pat. No. '409), plasmids (Cull et al. (1992) Proc Natl Acad Sci USA 89:1865-1869) or on phage (Scott and Smith (1990) Science 249:386-390); (Devlin (1990) Science 249:404-406); (Cwirla et al. (1990) Proc. Natl. Acad. Sci. 87:6378-6382); (Felici (1991) J. Mol. Biol. 222:301-310); (Ladner supra.).

[0853] In one embodiment, an assay is a cell-based assay in which a cell which expresses a 15986, 2188, 20743, 9148, 9151, 9791, 44252, 14184, 42461, 8204, 7970, 25552, 21657, 26492, 2411, 15088, 1905, 28899, 63380, 33935, 10480, 12686, 25501, 17694, 15701, 53062, 49908, 21612, 38949, 6216, 46863, 9235, 2201, 6985, 9883, 12238, 18057, 21617, 39228, 49928, 54476, 62113, 64316, 12264, 32362, 58198, 2887, 3205, 8557, 9600, 9693, 44867, 53058, 55556, 57658, 2208, 10252, 10302, 14218, 33877, 10317, 10485, 25964, 14815, 1363, 1397, 14827, 21708, 3801, 64698, 2179 or 13249 protein or biologically active portion thereof is contacted with a test compound and the ability of the test compound to modulate 15986, 2188, 20743, 9148, 9151, 9791, 44252, 14184, 42461, 8204, 7970, 25552, 21657, 26492, 2411, 15088, 1905, 28899, 63380, 33935, 10480, 12686, 25501, 17694, 15701, 53062, 49908, 21612, 38949, 6216, 46863, 9235, 2201, 6985, 9883, 12238, 18057, 21617, 39228, 49928, 54476, 62113, 64316, 12264, 32362, 58198, 2887, 3205, 8557, 9600, 9693, 44867, 53058, 55556, 57658, 2208, 10252, 10302, 14218, 33877, 10317, 10485, 25964, 14815, 1363, 1397, 14827, 21708, 3801, 64698, 2179 or 13249 activity is determined. Determining the ability of the test compound to modulate 15986, 2188, 20743, 9148, 9151, 9791, 44252, 14184, 42461, 8204, 7970, 25552, 21657, 26492, 2411, 15088, 1905, 28899, 63380, 33935, 10480, 12686, 25501, 17694, 15701, 53062, 49908, 21612, 38949, 6216, 46863, 9235, 2201, 6985, 9883, 12238, 18057, 21617, 39228, 49928, 54476, 62113, 64316, 12264, 32362, 58198, 2887, 3205, 8557, 9600, 9693, 44867, 53058, 55556, 57658, 2208, 10252, 10302, 14218, 33877, 10317, 10485, 25964, 14815, 1363, 1397, 14827, 21708, 3801, 64698, 2179 or 13249 activity can be accomplished by monitoring, for example, intracellular calcium, IP₃, cAMP, or diacylglycerol concentration, the phosphorylation profile of intracellular proteins, cell proliferation and/or migration, gene expression of, for example, cell surface adhesion molecules or genes associated with cancer, or the activity of a 15986, 2188, 20743, 9148, 9151, 9791, 44252, 14184, 42461, 8204, 7970, 25552, 21657, 26492, 2411, 15088, 1905, 28899, 63380, 33935, 10480, 12686, 25501, 17694, 15701, 53062, 49908, 21612, 38949, 6216, 46863, 9235, 2201, 6985, 9883, 12238, 18057, 21617, 39228, 49928, 54476, 62113, 64316, 12264, 32362, 58198, 2887, 3205, 8557, 9600, 9693, 44867, 53058, 55556, 57658, 2208, 10252, 10302, 14218, 33877, 10317, 10485, 25964, 14815, 1363, 1397, 14827, 21708, 3801, 64698, 2179 or 13249-regulated transcription factor. The cell can be of mammalian origin, e.g., a cancer cell. In one embodiment, compounds that interact with a receptor domain can be screened for their ability to function as ligands, i.e., to bind to the receptor and modulate a signal transduction pathway. Identification of ligands, and measuring the activity of the ligand-receptor complex, leads to the identification of modulators (e.g., antagonists) of this interaction. Such modulators may be useful in the treatment of a cancer.

[0854] The ability of the test compound to modulate 15986, 2188, 20743, 9148, 9151, 9791, 44252, 14184, 42461, 8204, 7970, 25552, 21657, 26492, 2411, 15088, 1905, 28899, 63380, 33935, 10480, 12686, 25501, 17694, 15701, 53062, 49908, 21612, 38949, 6216, 46863, 9235, 2201, 6985, 9883, 12238, 18057, 21617, 39228, 49928, 54476, 62113, 64316, 12264, 32362, 58198, 2887, 3205, 8557, 9600, 9693, 44867, 53058, 55556, 57658, 2208, 10252, 10302, 14218, 33877, 10317, 10485, 25964, 14815, 1363, 1397, 14827, 21708, 3801, 64698, 2179 or 13249 binding to a substrate or to bind to 15986, 2188, 20743, 9148, 9151, 9791, 44252, 14184, 42461, 8204, 7970, 25552, 21657, 26492, 2411, 15088, 1905, 28899, 63380, 33935, 10480, 12686, 25501, 17694, 15701, 53062, 49908, 21612, 38949, 6216, 46863, 9235, 2201, 6985, 9883, 12238, 18057, 21617, 39228, 49928, 54476, 62113, 64316, 12264, 32362, 58198, 2887, 3205, 8557, 9600, 9693, 44867, 53058, 55556, 57658, 2208, 10252, 10302, 14218, 33877, 10317, 10485, 25964, 14815, 1363, 1397, 14827, 21708, 3801, 64698, 2179 or 13249 can also be determined. Determining the ability of the test compound to modulate 15986, 2188, 20743, 9148, 9151, 9791, 44252, 14184, 42461, 8204, 7970, 25552, 21657, 26492, 2411, 15088, 1905, 28899, 63380, 33935, 10480, 12686, 25501, 17694, 15701, 53062, 49908, 21612, 38949, 6216, 46863, 9235, 2201, 6985, 9883, 12238, 18057, 21617, 39228, 49928, 54476, 62113, 64316, 12264, 32362, 58198, 2887, 3205, 8557, 9600, 9693, 44867, 53058, 55556, 57658, 2208, 10252, 10302, 14218, 33877, 10317, 10485, 25964, 14815, 1363, 1397, 14827, 21708, 3801, 64698, 2179 or 13249 binding to a substrate can be accomplished, for example, by coupling the 15986, 2188, 20743, 9148, 9151, 9791, 44252, 14184, 42461, 8204, 7970, 25552, 21657, 26492, 2411, 15088, 1905, 28899, 63380, 33935, 10480, 12686, 25501, 17694, 15701, 53062, 49908, 21612, 38949, 6216, 46863, 9235, 2201, 6985, 9883, 12238, 18057, 21617, 39228, 49928, 54476, 62113, 64316, 12264, 32362, 58198, 2887, 3205, 8557, 9600, 9693, 44867, 53058, 55556, 57658, 2208, 10252, 10302, 14218, 33877, 10317, 10485, 25964, 14815, 1363, 1397, 14827, 21708, 3801, 64698, 2179 or 13249 substrate with a radioisotope or enzymatic label such that binding of the 15986, 2188, 20743, 9148, 9151, 9791, 44252, 14184, 42461, 8204, 7970, 25552, 21657, 26492, 2411, 15088, 1905, 28899, 63380, 33935, 10480, 12686, 25501, 17694, 15701, 53062, 49908, 21612, 38949, 6216, 46863, 9235, 2201, 6985, 9883, 12238, 18057, 21617, 39228, 49928, 54476, 62113, 64316, 12264, 32362, 58198, 2887, 3205, 8557, 9600, 9693, 44867, 53058, 55556, 57658, 2208, 10252, 10302, 14218, 33877, 10317, 10485, 25964, 14815, 1363, 1397, 14827, 21708, 3801, 64698, 2179 or 13249 substrate to 15986, 2188, 20743, 9148, 9151, 9791, 44252, 14184, 42461, 8204, 7970, 25552, 21657, 26492, 2411, 15088, 1905, 28899, 63380, 33935, 10480, 12686, 25501, 17694, 15701, 53062, 49908, 21612, 38949, 6216, 46863, 9235, 2201, 6985, 9883, 12238, 18057, 21617, 39228, 49928, 54476, 62113, 64316, 12264, 32362, 58198, 2887, 3205, 8557, 9600, 9693, 44867, 53058, 55556, 57658, 2208, 10252, 10302, 14218, 33877, 10317, 10485, 25964, 14815, 1363, 1397, 14827, 21708, 3801, 64698, 2179 or 13249 can be determined by detecting the labeled 15986, 2188, 20743, 9148, 9151, 9791, 44252, 14184, 42461, 8204, 7970, 25552, 21657, 26492, 2411, 15088, 1905, 28899, 63380, 33935, 10480, 12686, 25501, 17694, 15701, 53062, 49908, 21612, 38949, 6216, 46863, 9235, 2201, 6985, 9883, 12238, 18057, 21617, 39228, 49928, 54476, 62113, 64316, 12264, 32362, 58198, 2887, 3205, 8557, 9600, 9693, 44867, 53058, 55556, 57658, 2208, 10252, 10302, 14218, 33877, 10317, 10485, 25964, 14815, 1363, 1397, 14827, 21708, 3801, 64698, 2179 or 13249 substrate in a complex. 15986, 2188, 20743, 9148, 9151, 9791, 44252, 14184, 42461, 8204, 7970, 25552, 21657, 26492, 2411, 15088, 1905, 28899, 63380, 33935, 10480, 12686, 25501, 17694, 15701, 53062, 49908, 21612, 38949, 6216, 46863, 9235, 2201, 6985, 9883, 12238, 18057, 21617, 39228, 49928, 54476, 62113, 64316, 12264, 32362, 58198, 2887, 3205, 8557, 9600, 9693, 44867, 53058, 55556, 57658, 2208, 10252, 10302, 14218, 33877, 10317, 10485, 25964, 14815, 1363, 1397, 14827, 21708, 3801, 64698, 2179 or 13249 could also be coupled with a radioisotope or enzymatic label to monitor the ability of a test compound to modulate 15986, 2188, 20743, 9148, 9151, 9791, 44252, 14184, 42461, 8204, 7970, 25552, 21657, 26492, 2411, 15088, 1905, 28899, 63380, 33935, 10480, 12686, 25501, 17694, 15701, 53062, 49908, 21612, 38949, 6216, 46863, 9235, 2201, 6985, 9883, 12238, 18057, 21617, 39228, 49928, 54476, 62113, 64316, 12264, 32362, 58198, 2887, 3205, 8557, 9600, 9693, 44867, 53058, 55556, 57658, 2208, 10252, 10302, 14218, 33877, 10317, 10485, 25964, 14815, 1363, 1397, 14827, 21708, 3801, 64698, 2179 or 13249 binding to a 15986, 2188, 20743, 9148, 9151, 9791, 44252, 14184, 42461, 8204, 7970, 25552, 21657, 26492, 2411, 15088, 1905, 28899, 63380, 33935, 10480, 12686, 25501, 17694, 15701, 53062, 49908, 21612, 38949, 6216, 46863, 9235, 2201, 6985, 9883, 12238, 18057, 21617, 39228, 49928, 54476, 62113, 64316, 12264, 32362, 58198, 2887, 3205, 8557, 9600, 9693, 44867, 53058, 55556, 57658, 2208, 10252, 10302, 14218, 33877, 10317, 10485, 25964, 14815, 1363, 1397, 14827, 21708, 3801, 64698, 2179 or 13249 substrate in a complex. Determining the ability of the test compound to bind 15986, 2188, 20743, 9148, 9151, 9791, 44252, 14184, 42461, 8204, 7970, 25552, 21657, 26492, 2411, 15088, 1905, 28899, 63380, 33935, 10480, 12686, 25501, 17694, 15701, 53062, 49908, 21612, 38949, 6216, 46863, 9235, 2201, 6985, 9883, 12238, 18057, 21617, 39228, 49928, 54476, 62113, 64316, 12264, 32362, 58198, 2887, 3205, 8557, 9600, 9693, 44867, 53058, 55556, 57658, 2208, 10252, 10302, 14218, 33877, 10317, 10485, 25964, 14815, 1363, 1397, 14827, 21708, 3801, 64698, 2179 or 13249 can be accomplished, for example, by coupling the compound with a radioisotope or enzymatic label such that binding of the compound to 15986, 2188, 20743, 9148, 9151, 9791, 44252, 14184, 42461, 8204, 7970, 25552, 21657, 26492, 2411, 15088, 1905, 28899, 63380, 33935, 10480, 12686, 25501, 17694, 15701, 53062, 49908, 21612, 38949, 6216, 46863, 9235, 2201, 6985, 9883, 12238, 18057, 21617, 39228, 49928, 54476, 62113, 64316, 12264, 32362, 58198, 2887, 3205, 8557, 9600, 9693, 44867, 53058, 55556, 57658, 2208, 10252, 10302, 14218, 33877, 10317, 10485, 25964, 14815, 1363, 1397, 14827, 21708, 3801, 64698, 2179 or 13249 can be determined by detecting the labeled 15986, 2188, 20743, 9148, 9151, 9791, 44252, 14184, 42461, 8204, 7970, 25552, 21657, 26492, 2411, 15088, 1905, 28899, 63380, 33935, 10480, 12686, 25501, 17694, 15701, 53062, 49908, 21612, 38949, 6216, 46863, 9235, 2201, 6985, 9883, 12238, 18057, 21617, 39228, 49928, 54476, 62113, 64316, 12264, 32362, 58198, 2887, 3205, 8557, 9600, 9693, 44867, 53058, 55556, 57658, 2208, 10252, 10302, 14218, 33877, 10317, 10485, 25964, 14815, 1363, 1397, 14827, 21708, 3801, 64698, 2179 or 13249 compound in a complex. For example, compounds (e.g., 15986, 2188, 20743, 9148, 9151, 9791, 44252, 14184, 42461, 8204, 7970, 25552, 21657, 26492, 2411, 15088, 1905, 28899, 63380, 33935, 10480, 12686, 25501, 17694, 15701, 53062, 49908, 21612, 38949, 6216, 46863, 9235, 2201, 6985, 9883, 12238, 18057, 21617, 39228, 49928, 54476, 62113, 64316, 12264, 32362, 58198, 2887, 3205, 8557, 9600, 9693, 44867, 53058, 55556, 57658, 2208, 10252, 10302, 14218, 33877, 10317, 10485, 25964, 14815, 1363, 1397, 14827, 21708, 3801, 64698, 2179 or 13249 ligands or substrates) can be labeled with ¹²⁵I, ³⁵S, ¹⁴C, or ³H, either directly or indirectly, and the radioisotope detected by direct counting of radioemmission or by scintillation counting. Compounds can further be enzymatically labeled with, for example, horseradish peroxidase, alkaline phosphatase, or luciferase, and the enzymatic label detected by determination of conversion of an appropriate substrate to product.

[0855] It is also within the scope of this invention to determine the ability of a compound (e.g., a 15986, 2188, 20743, 9148, 9151, 9791, 44252, 14184, 42461, 8204, 7970, 25552, 21657, 26492, 2411, 15088, 1905, 28899, 63380, 33935, 10480, 12686, 25501, 17694, 15701, 53062, 49908, 21612, 38949, 6216, 46863, 9235, 2201, 6985, 9883, 12238, 18057, 21617, 39228, 49928, 54476, 62113, 64316, 12264, 32362, 58198, 2887, 3205, 8557, 9600, 9693, 44867, 53058, 55556, 57658, 2208, 10252, 10302, 14218, 33877, 10317, 10485, 25964, 14815, 1363, 1397, 14827, 21708, 3801, 64698, 2179 or 13249 ligand or substrate) to interact with 15986, 2188, 20743, 9148, 9151, 9791, 44252, 14184, 42461, 8204, 7970, 25552, 21657, 26492, 2411, 15088, 1905, 28899, 63380, 33935, 10480, 12686, 25501, 17694, 15701, 53062, 49908, 21612, 38949, 6216, 46863, 9235, 2201, 6985, 9883, 12238, 18057, 21617, 39228, 49928, 54476, 62113, 64316, 12264, 32362, 58198, 2887, 3205, 8557, 9600, 9693, 44867, 53058, 55556, 57658, 2208, 10252, 10302, 14218, 33877, 10317, 10485, 25964, 14815, 1363, 1397, 14827, 21708, 3801, 64698, 2179 or 13249 without the labeling of any of the interactants. For example, a microphysiometer can be used to detect the interaction of a compound with 15986, 2188, 20743, 9148, 9151, 9791, 44252, 14184, 42461, 8204, 7970, 25552, 21657, 26492, 2411, 15088, 1905, 28899, 63380, 33935, 10480, 12686, 25501, 17694, 15701, 53062, 49908, 21612, 38949, 6216, 46863, 9235, 2201, 6985, 9883, 12238, 18057, 21617, 39228, 49928, 54476, 62113, 64316, 12264, 32362, 58198, 2887, 3205, 8557, 9600, 9693, 44867, 53058, 55556, 57658, 2208, 10252, 10302, 14218, 33877, 10317, 10485, 25964, 14815, 1363, 1397, 14827, 21708, 3801, 64698, 2179 or 13249 without the labeling of either the compound or the 15986, 2188, 20743, 9148, 9151, 9791, 44252, 14184, 42461, 8204, 7970, 25552, 21657, 26492, 2411, 15088, 1905, 28899, 63380, 33935, 10480, 12686, 25501, 17694, 15701, 53062, 49908, 21612, 38949, 6216, 46863, 9235, 2201, 6985, 9883, 12238, 18057, 21617, 39228, 49928, 54476, 62113, 64316, 12264, 32362, 58198, 2887, 3205, 8557, 9600, 9693, 44867, 53058, 55556, 57658, 2208, 10252, 10302, 14218, 33877, 10317, 10485, 25964, 14815, 1363, 1397, 14827, 21708, 3801, 64698, 2179 or 13249 (McConnell, H. M. et al. (1992) Science 257:1906-1912. As used herein, a “microphysiometer” (e.g., Cytosensor) is an analytical instrument that measures the rate at which a cell acidifies its environment using a light-addressable potentiometric sensor (LAPS). Changes in this acidification rate can be used as an indicator of the interaction between a compound and 15986, 2188, 20743, 9148, 9151, 9791, 44252, 14184, 42461, 8204, 7970, 25552, 21657, 26492, 2411, 15088, 1905, 28899, 63380, 33935, 10480, 12686, 25501, 17694, 15701, 53062, 49908, 21612, 38949, 6216, 46863, 9235, 2201, 6985, 9883, 12238, 18057, 21617, 39228, 49928, 54476, 62113, 64316, 12264, 32362, 58198, 2887, 3205, 8557, 9600, 9693, 44867, 53058, 55556, 57658, 2208, 10252, 10302, 14218, 33877, 10317, 10485, 25964, 14815, 1363, 1397, 14827, 21708, 3801, 64698, 2179 or 13249.

[0856] In another embodiment, an assay is a cell-based assay comprising contacting a cell expressing a 15986, 2188, 20743, 9148, 9151, 9791, 44252, 14184, 42461, 8204, 7970, 25552, 21657, 26492, 2411, 15088, 1905, 28899, 63380, 33935, 10480, 12686, 25501, 17694, 15701, 53062, 49908, 21612, 38949, 6216, 46863, 9235, 2201, 6985, 9883, 12238, 18057, 21617, 39228, 49928, 54476, 62113, 64316, 12264, 32362, 58198, 2887, 3205, 8557, 9600, 9693, 44867, 53058, 55556, 57658, 2208, 10252, 10302, 14218, 33877, 10317, 10485, 25964, 14815, 1363, 1397, 14827, 21708, 3801, 64698, 2179 or 13249 target molecule (e.g., a 15986, 2188, 20743, 9148, 9151, 9791, 44252, 14184, 42461, 8204, 7970, 25552, 21657, 26492, 2411, 15088, 1905, 28899, 63380, 33935, 10480, 12686, 25501, 17694, 15701, 53062, 49908, 21612, 38949, 6216, 46863, 9235, 2201, 6985, 9883, 12238, 18057, 21617, 39228, 49928, 54476, 62113, 64316, 12264, 32362, 58198, 2887, 3205, 8557, 9600, 9693, 44867, 53058, 55556, 57658, 2208, 10252, 10302, 14218, 33877, 10317, 10485, 25964, 14815, 1363, 1397, 14827, 21708, 3801, 64698, 2179 or 13249 substrate) with a test compound and determining the ability of the test compound to modulate (e.g., stimulate or inhibit) the activity of the 15986, 2188, 20743, 9148, 9151, 9791, 44252, 14184, 42461, 8204, 7970, 25552, 21657, 26492, 2411, 15088, 1905, 28899, 63380, 33935, 10480, 12686, 25501, 17694, 15701, 53062, 49908, 21612, 38949, 6216, 46863, 9235, 2201, 6985, 9883, 12238, 18057, 21617, 39228, 49928, 54476, 62113, 64316, 12264, 32362, 58198, 2887, 3205, 8557, 9600, 9693, 44867, 53058, 55556, 57658, 2208, 10252, 10302, 14218, 33877, 10317, 10485, 25964, 14815, 1363, 1397, 14827, 21708, 3801, 64698, 2179 or 13249 target molecule. Determining the ability of the test compound to modulate the activity of a 15986, 2188, 20743, 9148, 9151, 9791, 44252, 14184, 42461, 8204, 7970, 25552, 21657, 26492, 2411, 15088, 1905, 28899, 63380, 33935, 10480, 12686, 25501, 17694, 15701, 53062, 49908, 21612, 38949, 6216, 46863, 9235, 2201, 6985, 9883, 12238, 18057, 21617, 39228, 49928, 54476, 62113, 64316, 12264, 32362, 58198, 2887, 3205, 8557, 9600, 9693, 44867, 53058, 55556, 57658, 2208, 10252, 10302, 14218, 33877, 10317, 10485, 25964, 14815, 1363, 1397, 14827, 21708, 3801, 64698, 2179 or 13249 target molecule can be accomplished, for example, by determining the ability of the 15986, 2188, 20743, 9148, 9151, 9791, 44252, 14184, 42461, 8204, 7970, 25552, 21657, 26492, 2411, 15088, 1905, 28899, 63380, 33935, 10480, 12686, 25501, 17694, 15701, 53062, 49908, 21612, 38949, 6216, 46863, 9235, 2201, 6985, 9883, 12238, 18057, 21617, 39228, 49928, 54476, 62113, 64316, 12264, 32362, 58198, 2887, 3205, 8557, 9600, 9693, 44867, 53058, 55556, 57658, 2208, 10252, 10302, 14218, 33877, 10317, 10485, 25964, 14815, 1363, 1397, 14827, 21708, 3801, 64698, 2179 or 13249 protein to bind to or interact with the 15986, 2188, 20743, 9148, 9151, 9791, 44252, 14184, 42461, 8204, 7970, 25552, 21657, 26492, 2411, 15088, 1905, 28899, 63380, 33935, 10480, 12686, 25501, 17694, 15701, 53062, 49908, 21612, 38949, 6216, 46863, 9235, 2201, 6985, 9883, 12238, 18057, 21617, 39228, 49928, 54476, 62113, 64316, 12264, 32362, 58198, 2887, 3205, 8557, 9600, 9693, 44867, 53058, 55556, 57658, 2208, 10252, 10302, 14218, 33877, 10317, 10485, 25964, 14815, 1363, 1397, 14827, 21708, 3801, 64698, 2179 or 13249 target molecule.

[0857] Determining the ability of the 15986, 2188, 20743, 9148, 9151, 9791, 44252, 14184, 42461, 8204, 7970, 25552, 21657, 26492, 2411, 15088, 1905, 28899, 63380, 33935, 10480, 12686, 25501, 17694, 15701, 53062, 49908, 21612, 38949, 6216, 46863, 9235, 2201, 6985, 9883, 12238, 18057, 21617, 39228, 49928, 54476, 62113, 64316, 12264, 32362, 58198, 2887, 3205, 8557, 9600, 9693, 44867, 53058, 55556, 57658, 2208, 10252, 10302, 14218, 33877, 10317, 10485, 25964, 14815, 1363, 1397, 14827, 21708, 3801, 64698, 2179 or 13249 protein or a biologically active fragment thereof, to bind to or interact with a 15986, 2188, 20743, 9148, 9151, 9791, 44252, 14184, 42461, 8204, 7970, 25552, 21657, 26492, 2411, 15088, 1905, 28899, 63380, 33935, 10480, 12686, 25501, 17694, 15701, 53062, 49908, 21612, 38949, 6216, 46863, 9235, 2201, 6985, 9883, 12238, 18057, 21617, 39228, 49928, 54476, 62113, 64316, 12264, 32362, 58198, 2887, 3205, 8557, 9600, 9693, 44867, 53058, 55556, 57658, 2208, 10252, 10302, 14218, 33877, 10317, 10485, 25964, 14815, 1363, 1397, 14827, 21708, 3801, 64698, 2179 or 13249 target molecule can be accomplished by one of the methods described above for determining direct binding. In a preferred embodiment, determining the ability of the 15986, 2188, 20743, 9148, 9151, 9791, 44252, 14184, 42461, 8204, 7970, 25552, 21657, 26492, 2411, 15088, 1905, 28899, 63380, 33935, 10480, 12686, 25501, 17694, 15701, 53062, 49908, 21612, 38949, 6216, 46863, 9235, 2201, 6985, 9883, 12238, 18057, 21617, 39228, 49928, 54476, 62113, 64316, 12264, 32362, 58198, 2887, 3205, 8557, 9600, 9693, 44867, 53058, 55556, 57658, 2208, 10252, 10302, 14218, 33877, 10317, 10485, 25964, 14815, 1363, 1397, 14827, 21708, 3801, 64698, 2179 or 13249 protein to bind to or interact with a 15986, 2188, 20743, 9148, 9151, 9791, 44252, 14184, 42461, 8204, 7970, 25552, 21657, 26492, 2411, 15088, 1905, 28899, 63380, 33935, 10480, 12686, 25501, 17694, 15701, 53062, 49908, 21612, 38949, 6216, 46863, 9235, 2201, 6985, 9883, 12238, 18057, 21617, 39228, 49928, 54476, 62113, 64316, 12264, 32362, 58198, 2887, 3205, 8557, 9600, 9693, 44867, 53058, 55556, 57658, 2208, 10252, 10302, 14218, 33877, 10317, 10485, 25964, 14815, 1363, 1397, 14827, 21708, 3801, 64698, 2179 or 13249 target molecule can be accomplished by determining the activity of the target molecule. For example, the activity of the target molecule can be determined by detecting induction of a cellular second messenger of the target (i.e., intracellular Ca²⁺, diacylglycerol, IP₃, cAMP), detecting catalytic/enzymatic activity of the target on an appropriate substrate, detecting the induction of a reporter gene (comprising a target-responsive regulatory element operatively linked to a nucleic acid encoding a detectable marker, e.g., luciferase), or detecting a target-regulated cellular response (e.g., gene expression).

[0858] In yet another embodiment, an assay of the present invention is a cell-free assay in which a 15986, 2188, 20743, 9148, 9151, 9791, 44252, 14184, 42461, 8204, 7970, 25552, 21657, 26492, 2411, 15088, 1905, 28899, 63380, 33935, 10480, 12686, 25501, 17694, 15701, 53062, 49908, 21612, 38949, 6216, 46863, 9235, 2201, 6985, 9883, 12238, 18057, 21617, 39228, 49928, 54476, 62113, 64316, 12264, 32362, 58198, 2887, 3205, 8557, 9600, 9693, 44867, 53058, 55556, 57658, 2208, 10252, 10302, 14218, 33877, 10317, 10485, 25964, 14815, 1363, 1397, 14827, 21708, 3801, 64698, 2179 or 13249 protein or biologically active portion thereof, is contacted with a test compound and the ability of the test compound to bind to the 15986, 2188, 20743, 9148, 9151, 9791, 44252, 14184, 42461, 8204, 7970, 25552, 21657, 26492, 2411, 15088, 1905, 28899, 63380, 33935, 10480, 12686, 25501, 17694, 15701, 53062, 49908, 21612, 38949, 6216, 46863, 9235, 2201, 6985, 9883, 12238, 18057, 21617, 39228, 49928, 54476, 62113, 64316, 12264, 32362, 58198, 2887, 3205, 8557, 9600, 9693, 44867, 53058, 55556, 57658, 2208, 10252, 10302, 14218, 33877, 10317, 10485, 25964, 14815, 1363, 1397, 14827, 21708, 3801, 64698, 2179 or 13249 protein or biologically active portion thereof is determined. Preferred biologically active portions of the 15986, 2188, 20743, 9148, 9151, 9791, 44252, 14184, 42461, 8204, 7970, 25552, 21657, 26492, 2411, 15088, 1905, 28899, 63380, 33935, 10480, 12686, 25501, 17694, 15701, 53062, 49908, 21612, 38949, 6216, 46863, 9235, 2201, 6985, 9883, 12238, 18057, 21617, 39228, 49928, 54476, 62113, 64316, 12264, 32362, 58198, 2887, 3205, 8557, 9600, 9693, 44867, 53058, 55556, 57658, 2208, 10252, 10302, 14218, 33877, 10317, 10485, 25964, 14815, 1363, 1397, 14827, 21708, 3801, 64698, 2179 or 13249 proteins to be used in assays of the present invention include fragments which participate in interactions with non-15986, 2188, 20743, 9148, 9151, 9791, 44252, 14184, 42461, 8204, 7970, 25552, 21657, 26492, 2411, 15088, 1905, 28899, 63380, 33935, 10480, 12686, 25501, 17694, 15701, 53062, 49908, 21612, 38949, 6216, 46863, 9235, 2201, 6985, 9883, 12238, 18057, 21617, 39228, 49928, 54476, 62113, 64316, 12264, 32362, 58198, 2887, 3205, 8557, 9600, 9693, 44867, 53058, 55556, 57658, 2208, 10252, 10302, 14218, 33877, 10317, 10485, 25964, 14815, 1363, 1397, 14827, 21708, 3801, 64698, 2179 or 13249 molecules, e.g., fragments with high surface probability scores. Binding of the test compound to the 15986, 2188, 20743, 9148, 9151, 9791, 44252, 14184, 42461, 8204, 7970, 25552, 21657, 26492, 2411, 15088, 1905, 28899, 63380, 33935, 10480, 12686, 25501, 17694, 15701, 53062, 49908, 21612, 38949, 6216, 46863, 9235, 2201, 6985, 9883, 12238, 18057, 21617, 39228, 49928, 54476, 62113, 64316, 12264, 32362, 58198, 2887, 3205, 8557, 9600, 9693, 44867, 53058, 55556, 57658, 2208, 10252, 10302, 14218, 33877, 10317, 10485, 25964, 14815, 1363, 1397, 14827, 21708, 3801, 64698, 2179 or 13249 protein can be determined either directly or indirectly as described above. In a preferred embodiment, the assay includes contacting the 15986, 2188, 20743, 9148, 9151, 9791, 44252, 14184, 42461, 8204, 7970, 25552, 21657, 26492, 2411, 15088, 1905, 28899, 63380, 33935, 10480, 12686, 25501, 17694, 15701, 53062, 49908, 21612, 38949, 6216, 46863, 9235, 2201, 6985, 9883, 12238, 18057, 21617, 39228, 49928, 54476, 62113, 64316, 12264, 32362, 58198, 2887, 3205, 8557, 9600, 9693, 44867, 53058, 55556, 57658, 2208, 10252, 10302, 14218, 33877, 10317, 10485, 25964, 14815, 1363, 1397, 14827, 21708, 3801, 64698, 2179 or 13249 protein or biologically active portion thereof with a known compound which binds 15986, 2188, 20743, 9148, 9151, 9791, 44252, 14184, 42461, 8204, 7970, 25552, 21657, 26492, 2411, 15088, 1905, 28899, 63380, 33935, 10480, 12686, 25501, 17694, 15701, 53062, 49908, 21612, 38949, 6216, 46863, 9235, 2201, 6985, 9883, 12238, 18057, 21617, 39228, 49928, 54476, 62113, 64316, 12264, 32362, 58198, 2887, 3205, 8557, 9600, 9693, 44867, 53058, 55556, 57658, 2208, 10252, 10302, 14218, 33877, 10317, 10485, 25964, 14815, 1363, 1397, 14827, 21708, 3801, 64698, 2179 or 13249 to form an assay mixture, contacting the assay mixture with a test compound, and determining the ability of the test compound to interact with a 15986, 2188, 20743, 9148, 9151, 9791, 44252, 14184, 42461, 8204, 7970, 25552, 21657, 26492, 2411, 15088, 1905, 28899, 63380, 33935, 10480, 12686, 25501, 17694, 15701, 53062, 49908, 21612, 38949, 6216, 46863, 9235, 2201, 6985, 9883, 12238, 18057, 21617, 39228, 49928, 54476, 62113, 64316, 12264, 32362, 58198, 2887, 3205, 8557, 9600, 9693, 44867, 53058, 55556, 57658, 2208, 10252, 10302, 14218, 33877, 10317, 10485, 25964, 14815, 1363, 1397, 14827, 21708, 3801, 64698, 2179 or 13249 protein, wherein determining the ability of the test compound to interact with a 15986, 2188, 20743, 9148, 9151, 9791, 44252, 14184, 42461, 8204, 7970, 25552, 21657, 26492, 2411, 15088, 1905, 28899, 63380, 33935, 10480, 12686, 25501, 17694, 15701, 53062, 49908, 21612, 38949, 6216, 46863, 9235, 2201, 6985, 9883, 12238, 18057, 21617, 39228, 49928, 54476, 62113, 64316, 12264, 32362, 58198, 2887, 3205, 8557, 9600, 9693, 44867, 53058, 55556, 57658, 2208, 10252, 10302, 14218, 33877, 10317, 10485, 25964, 14815, 1363, 1397, 14827, 21708, 3801, 64698, 2179 or 13249 protein comprises determining the ability of the test compound to preferentially bind to 15986, 2188, 20743, 9148, 9151, 9791, 44252, 14184, 42461, 8204, 7970, 25552, 21657, 26492, 2411, 15088, 1905, 28899, 63380, 33935, 10480, 12686, 25501, 17694, 15701, 53062, 49908, 21612, 38949, 6216, 46863, 9235, 2201, 6985, 9883, 12238, 18057, 21617, 39228, 49928, 54476, 62113, 64316, 12264, 32362, 58198, 2887, 3205, 8557, 9600, 9693, 44867, 53058, 55556, 57658, 2208, 10252, 10302, 14218, 33877, 10317, 10485, 25964, 14815, 1363, 1397, 14827, 21708, 3801, 64698, 2179 or 13249 or biologically active portion thereof as compared to the known compound. Compounds that modulate the interaction of 15986, 2188, 20743, 9148, 9151, 9791, 44252, 14184, 42461, 8204, 7970, 25552, 21657, 26492, 2411, 15088, 1905, 28899, 63380, 33935, 10480, 12686, 25501, 17694, 15701, 53062, 49908, 21612, 38949, 6216, 46863, 9235, 2201, 6985, 9883, 12238, 18057, 21617, 39228, 49928, 54476, 62113, 64316, 12264, 32362, 58198, 2887, 3205, 8557, 9600, 9693, 44867, 53058, 55556, 57658, 2208, 10252, 10302, 14218, 33877, 10317, 10485, 25964, 14815, 1363, 1397, 14827, 21708, 3801, 64698, 2179 or 13249 with a known target protein may be useful in regulating the activity of a 15986, 2188, 20743, 9148, 9151, 9791, 44252, 14184, 42461, 8204, 7970, 25552, 21657, 26492, 2411, 15088, 1905, 28899, 63380, 33935, 10480, 12686, 25501, 17694, 15701, 53062, 49908, 21612, 38949, 6216, 46863, 9235, 2201, 6985, 9883, 12238, 18057, 21617, 39228, 49928, 54476, 62113, 64316, 12264, 32362, 58198, 2887, 3205, 8557, 9600, 9693, 44867, 53058, 55556, 57658, 2208, 10252, 10302, 14218, 33877, 10317, 10485, 25964, 14815, 1363, 1397, 14827, 21708, 3801, 64698, 2179 or 13249 protein, especially a mutant 15986, 2188, 20743, 9148, 9151, 9791, 44252, 14184, 42461, 8204, 7970, 25552, 21657, 26492, 2411, 15088, 1905, 28899, 63380, 33935, 10480, 12686, 25501, 17694, 15701, 53062, 49908, 21612, 38949, 6216, 46863, 9235, 2201, 6985, 9883, 12238, 18057, 21617, 39228, 49928, 54476, 62113, 64316, 12264, 32362, 58198, 2887, 3205, 8557, 9600, 9693, 44867, 53058, 55556, 57658, 2208, 10252, 10302, 14218, 33877, 10317, 10485, 25964, 14815, 1363, 1397, 14827, 21708, 3801, 64698, 2179 or 13249 protein.

[0859] In another embodiment, the assay is a cell-free assay in which a 15986, 2188, 20743, 9148, 9151, 9791, 44252, 14184, 42461, 8204, 7970, 25552, 21657, 26492, 2411, 15088, 1905, 28899, 63380, 33935, 10480, 12686, 25501, 17694, 15701, 53062, 49908, 21612, 38949, 6216, 46863, 9235, 2201, 6985, 9883, 12238, 18057, 21617, 39228, 49928, 54476, 62113, 64316, 12264, 32362, 58198, 2887, 3205, 8557, 9600, 9693, 44867, 53058, 55556, 57658, 2208, 10252, 10302, 14218, 33877, 10317, 10485, 25964, 14815, 1363, 1397, 14827, 21708, 3801, 64698, 2179 or 13249 protein or biologically active portion thereof is contacted with a test compound and the ability of the test compound to modulate (e.g., stimulate or inhibit) the activity of the 15986, 2188, 20743, 9148, 9151, 9791, 44252, 14184, 42461, 8204, 7970, 25552, 21657, 26492, 2411, 15088, 1905, 28899, 63380, 33935, 10480, 12686, 25501, 17694, 15701, 53062, 49908, 21612, 38949, 6216, 46863, 9235, 2201, 6985, 9883, 12238, 18057, 21617, 39228, 49928, 54476, 62113, 64316, 12264, 32362, 58198, 2887, 3205, 8557, 9600, 9693, 44867, 53058, 55556, 57658, 2208, 10252, 10302, 14218, 33877, 10317, 10485, 25964, 14815, 1363, 1397, 14827, 21708, 3801, 64698, 2179 or 13249 protein or biologically active portion thereof is determined. Determining the ability of the test compound to modulate the activity of a 15986, 2188, 20743, 9148, 9151, 9791, 44252, 14184, 42461, 8204, 7970, 25552, 21657, 26492, 2411, 15088, 1905, 28899, 63380, 33935, 10480, 12686, 25501, 17694, 15701, 53062, 49908, 21612, 38949, 6216, 46863, 9235, 2201, 6985, 9883, 12238, 18057, 21617, 39228, 49928, 54476, 62113, 64316, 12264, 32362, 58198, 2887, 3205, 8557, 9600, 9693, 44867, 53058, 55556, 57658, 2208, 10252, 10302, 14218, 33877, 10317, 10485, 25964, 14815, 1363, 1397, 14827, 21708, 3801, 64698, 2179 or 13249 protein can be accomplished, for example, by determining the ability of the 15986, 2188, 20743, 9148, 9151, 9791, 44252, 14184, 42461, 8204, 7970, 25552, 21657, 26492, 2411, 15088, 1905, 28899, 63380, 33935, 10480, 12686, 25501, 17694, 15701, 53062, 49908, 21612, 38949, 6216, 46863, 9235, 2201, 6985, 9883, 12238, 18057, 21617, 39228, 49928, 54476, 62113, 64316, 12264, 32362, 58198, 2887, 3205, 8557, 9600, 9693, 44867, 53058, 55556, 57658, 2208, 10252, 10302, 14218, 33877, 10317, 10485, 25964, 14815, 1363, 1397, 14827, 21708, 3801, 64698, 2179 or 13249 protein to bind to a 15986, 2188, 20743, 9148, 9151, 9791, 44252, 14184, 42461, 8204, 7970, 25552, 21657, 26492, 2411, 15088, 1905, 28899, 63380, 33935, 10480, 12686, 25501, 17694, 15701, 53062, 49908, 21612, 38949, 6216, 46863, 9235, 2201, 6985, 9883, 12238, 18057, 21617, 39228, 49928, 54476, 62113, 64316, 12264, 32362, 58198, 2887, 3205, 8557, 9600, 9693, 44867, 53058, 55556, 57658, 2208, 10252, 10302, 14218, 33877, 10317, 10485, 25964, 14815, 1363, 1397, 14827, 21708, 3801, 64698, 2179 or 13249 target molecule by one of the methods described above for determining direct binding. Determining the ability of the 15986, 2188, 20743, 9148, 9151, 9791, 44252, 14184, 42461, 8204, 7970, 25552, 21657, 26492, 2411, 15088, 1905, 28899, 63380, 33935, 10480, 12686, 25501, 17694, 15701, 53062, 49908, 21612, 38949, 6216, 46863, 9235, 2201, 6985, 9883, 12238, 18057, 21617, 39228, 49928, 54476, 62113, 64316, 12264, 32362, 58198, 2887, 3205, 8557, 9600, 9693, 44867, 53058, 55556, 57658, 2208, 10252, 10302, 14218, 33877, 10317, 10485, 25964, 14815, 1363, 1397, 14827, 21708, 3801, 64698, 2179 or 13249 protein to bind to a 15986, 2188, 20743, 9148, 9151, 9791, 44252, 14184, 42461, 8204, 7970, 25552, 21657, 26492, 2411, 15088, 1905, 28899, 63380, 33935, 10480, 12686, 25501, 17694, 15701, 53062, 49908, 21612, 38949, 6216, 46863, 9235, 2201, 6985, 9883, 12238, 18057, 21617, 39228, 49928, 54476, 62113, 64316, 12264, 32362, 58198, 2887, 3205, 8557, 9600, 9693, 44867, 53058, 55556, 57658, 2208, 10252, 10302, 14218, 33877, 10317, 10485, 25964, 14815, 1363, 1397, 14827, 21708, 3801, 64698, 2179 or 13249 target molecule can also be accomplished using a technology such as real-time Biomolecular Interaction Analysis (BIA) (Sjolander, S. and Urbaniczky, C. (1991) Anal. Chem. 63:2338-2345 and Szabo et al. (1995) Curr. Opin. Struct. Biol. 5:699-705). As used herein, “BIA” is a technology for studying biospecific interactions in real time, without labeling any of the interactants (e.g., BIAcore). Changes in the optical phenomenon of surface plasmon resonance (SPR) can be used as an indication of real-time reactions between biological molecules.

[0860] In another embodiment, determining the ability of the test compound to modulate the activity of a 15986, 2188, 20743, 9148, 9151, 9791, 44252, 14184, 42461, 8204, 7970, 25552, 21657, 26492, 2411, 15088, 1905, 28899, 63380, 33935, 10480, 12686, 25501, 17694, 15701, 53062, 49908, 21612, 38949, 6216, 46863, 9235, 2201, 6985, 9883, 12238, 18057, 21617, 39228, 49928, 54476, 62113, 64316, 12264, 32362, 58198, 2887, 3205, 8557, 9600, 9693, 44867, 53058, 55556, 57658, 2208, 10252, 10302, 14218, 33877, 10317, 10485, 25964, 14815, 1363, 1397, 14827, 21708, 3801, 64698, 2179 or 13249 protein can be accomplished by determining the ability of the 15986, 2188, 20743, 9148, 9151, 9791, 44252, 14184, 42461, 8204, 7970, 25552, 21657, 26492, 2411, 15088, 1905, 28899, 63380, 33935, 10480, 12686, 25501, 17694, 15701, 53062, 49908, 21612, 38949, 6216, 46863, 9235, 2201;6985, 9883, 12238, 18057, 21617, 39228, 49928, 54476, 62113, 64316, 12264, 32362, 58198, 2887, 3205, 8557, 9600, 9693, 44867, 53058, 55556, 57658, 2208, 10252, 10302, 14218, 33877, 10317, 10485, 25964, 14815, 1363, 1397, 14827, 21708, 3801, 64698, 2179 or 13249 protein to further modulate the activity of a downstream effector of a 15986, 2188, 20743, 9148, 9151, 9791, 44252, 14184, 42461, 8204, 7970, 25552, 21657, 26492, 2411, 15088, 1905, 28899, 63380, 33935, 10480, 12686, 25501, 17694, 15701, 53062, 49908, 21612, 38949, 6216, 46863, 9235, 2201, 6985, 9883, 12238, 18057, 21617, 39228, 49928, 54476, 62113, 64316, 12264, 32362, 58198, 2887, 3205, 8557, 9600, 9693, 44867, 53058, 55556, 57658, 2208, 10252, 10302, 14218, 33877, 10317, 10485, 25964, 14815, 1363, 1397, 14827, 21708, 3801, 64698, 2179 or 13249 target molecule. For example, the activity of the effector molecule on an appropriate target can be determined or the binding of the effector to an appropriate target can be determined as previously described.

[0861] In yet another embodiment, the cell-free assay involves contacting a 15986, 2188, 20743, 9148, 9151, 9791, 44252, 14184, 42461, 8204, 7970, 25552, 21657, 26492, 2411, 15088, 1905, 28899, 63380, 33935, 10480, 12686, 25501, 17694, 15701, 53062, 49908, 21612, 38949, 6216, 46863, 9235, 2201, 6985, 9883, 12238, 18057, 21617, 39228, 49928, 54476, 62113, 64316, 12264, 32362, 58198, 2887, 3205, 8557, 9600, 9693, 44867, 53058, 55556, 57658, 2208, 10252, 10302, 14218, 33877, 10317, 10485, 25964, 14815, 1363, 1397, 14827, 21708, 3801, 64698, 2179 or 13249 protein or biologically active portion thereof with a known compound which binds the 15986, 2188, 20743, 9148, 9151, 9791, 44252, 14184, 42461, 8204, 7970, 25552, 21657, 26492, 2411, 15088, 1905, 28899, 63380, 33935, 10480, 12686, 25501, 17694, 15701, 53062, 49908, 21612, 38949, 6216, 46863, 9235, 2201, 6985, 9883, 12238, 18057, 21617, 39228, 49928, 54476, 62113, 64316, 12264, 32362, 58198, 2887, 3205, 8557, 9600, 9693, 44867, 53058, 55556, 57658, 2208, 10252, 10302, 14218, 33877, 10317, 10485, 25964, 14815, 1363, 1397, 14827, 21708, 3801, 64698, 2179 or 13249 protein to form an assay mixture, contacting the assay mixture with a test compound, and determining the ability of the test compound to interact with the 15986, 2188, 20743, 9148, 9151, 9791, 44252, 14184, 42461, 8204, 7970, 25552, 21657, 26492, 2411, 15088, 1905, 28899, 63380, 33935, 10480, 12686, 25501, 17694, 15701, 53062, 49908, 21612, 38949, 6216, 46863, 9235, 2201, 6985, 9883, 12238, 18057, 21617, 39228, 49928, 54476, 62113, 64316, 12264, 32362, 58198, 2887, 3205, 8557, 9600, 9693, 44867, 53058, 55556, 57658, 2208, 10252, 10302, 14218, 33877, 10317, 10485, 25964, 14815, 1363, 1397, 14827, 21708, 3801, 64698, 2179 or 13249 protein, wherein determining the ability of the test compound to interact with the 15986, 2188, 20743, 9148, 9151, 9791, 44252, 14184, 42461, 8204, 7970, 25552, 21657, 26492, 2411, 15088, 1905, 28899, 63380, 33935, 10480, 12686, 25501, 17694, 15701, 53062, 49908, 21612, 38949, 6216, 46863, 9235, 2201, 6985, 9883, 12238, 18057, 21617, 39228, 49928, 54476, 62113, 64316, 12264, 32362, 58198, 2887, 3205, 8557, 9600, 9693, 44867, 53058, 55556, 57658, 2208, 10252, 10302, 14218, 33877, 10317, 10485, 25964, 14815, 1363, 1397, 14827, 21708, 3801, 64698, 2179 or 13249 protein comprises determining the ability of the 15986, 2188, 20743, 9148, 9151, 9791, 44252, 14184, 42461, 8204, 7970, 25552, 21657, 26492, 2411, 15088, 1905, 28899, 63380, 33935, 10480, 12686, 25501, 17694, 15701, 53062, 49908, 21612, 38949, 6216, 46863, 9235, 2201, 6985, 9883, 12238, 18057, 21617, 39228, 49928, 54476, 62113, 64316, 12264, 32362, 58198, 2887, 3205, 8557, 9600, 9693, 44867, 53058, 55556, 57658, 2208, 10252, 10302, 14218, 33877, 10317, 10485, 25964, 14815, 1363, 1397, 14827, 21708, 3801, 64698, 2179 or 13249 protein to preferentially bind to or modulate the activity of a 15986, 2188, 20743, 9148, 9151, 9791, 44252, 14184, 42461, 8204, 7970, 25552, 21657, 26492, 2411, 15088, 1905, 28899, 63380, 33935, 10480, 12686, 25501, 17694, 15701, 53062, 49908, 21612, 38949, 6216, 46863, 9235, 2201, 6985, 9883, 12238, 18057, 21617, 39228, 49928, 54476, 62113, 64316, 12264, 32362, 58198, 2887, 3205, 8557, 9600, 9693, 44867, 53058, 55556, 57658, 2208, 10252, 10302, 14218, 33877, 10317, 10485, 25964, 14815, 1363, 1397, 14827, 21708, 3801, 64698, 2179 or 13249 target molecule.

[0862] In more than one embodiment of the above assay methods of the present invention, it may be desirable to immobilize either 15986, 2188, 20743, 9148, 9151, 9791, 44252, 14184, 42461, 8204, 7970, 25552, 21657, 26492, 2411, 15088, 1905, 28899, 63380, 33935, 10480, 12686, 25501, 17694, 15701, 53062, 49908, 21612, 38949, 6216, 46863, 9235, 2201, 6985, 9883, 12238, 18057, 21617, 39228, 49928, 54476, 62113, 64316, 12264, 32362, 58198, 2887, 3205, 8557, 9600, 9693, 44867, 53058, 55556, 57658, 2208, 10252, 10302, 14218, 33877, 10317, 10485, 25964, 14815, 1363, 1397, 14827, 21708, 3801, 64698, 2179 or 13249 or its target molecule to facilitate separation of complexed from uncomplexed forms of one or both of the proteins, as well as to accommodate automation of the assay. Binding of a test compound to a 15986, 2188, 20743, 9148, 9151, 9791, 44252, 14184, 42461, 8204, 7970, 25552, 21657, 26492, 2411, 15088, 1905, 28899, 63380, 33935, 10480, 12686, 25501, 17694, 15701, 53062, 49908, 21612, 38949, 6216, 46863, 9235, 2201, 6985, 9883, 12238, 18057, 21617, 39228, 49928, 54476, 62113, 64316, 12264, 32362, 58198, 2887, 3205, 8557, 9600, 9693, 44867, 53058, 55556, 57658, 2208, 10252, 10302, 14218, 33877, 10317, 10485, 25964, 14815, 1363, 1397, 14827, 21708, 3801, 64698, 2179 or 13249 protein, or interaction of a 15986, 2188, 20743, 9148, 9151, 9791, 44252, 14184, 42461, 8204, 7970, 25552, 21657, 26492, 2411, 15088, 1905, 28899, 63380, 33935, 10480, 12686, 25501, 17694, 15701, 53062, 49908, 21612, 38949, 6216, 46863, 9235, 2201, 6985, 9883, 12238, 18057, 21617, 39228, 49928, 54476, 62113, 64316, 12264, 32362, 58198, 2887, 3205, 8557, 9600, 9693, 44867, 53058, 55556, 57658, 2208, 10252, 10302, 14218, 33877, 10317, 10485, 25964, 14815, 1363, 1397, 14827, 21708, 3801, 64698, 2179 or 13249 protein with a target molecule in the presence and absence of a candidate compound, can be accomplished in any vessel suitable for containing the reactants. Examples of such vessels include microtitre plates, test tubes, and micro-centrifuge tubes. In one embodiment, a fusion protein can be provided which adds a domain that allows one or both of the proteins to be bound to a matrix. For example, glutathione-S-transferase/15986, 2188, 20743, 9148, 9151, 9791, 44252, 14184, 42461, 8204, 7970, 25552, 21657, 26492, 2411, 15088, 1905, 28899, 63380, 33935, 10480, 12686, 25501, 17694, 15701, 53062, 49908, 21612, 38949, 6216, 46863, 9235, 2201, 6985, 9883, 12238, 18057, 21617, 39228, 49928, 54476, 62113, 64316, 12264, 32362, 58198, 2887, 3205, 8557, 9600, 9693, 44867, 53058, 55556, 57658, 2208, 10252, 10302, 14218, 33877, 10317, 10485, 25964, 14815, 1363, 1397, 14827, 21708, 3801, 64698, 2179 or 13249 fusion proteins or glutathione-S-transferase/target fusion proteins can be adsorbed onto glutathione sepharose beads (Sigma Chemical, St. Louis, Mo.) or glutathione derivatized microtitre plates, which are then combined with the test compound or the test compound and either the non-adsorbed target protein or 15986, 2188, 20743, 9148, 9151, 9791, 44252, 14184, 42461, 8204, 7970, 25552, 21657, 26492, 2411, 15088, 1905, 28899, 63380, 33935, 10480, 12686, 25501, 17694, 15701, 53062, 49908, 21612, 38949, 6216, 46863, 9235, 2201, 6985, 9883, 12238, 18057, 21617, 39228, 49928, 54476, 62113, 64316, 12264, 32362, 58198, 2887, 3205, 8557, 9600, 9693, 44867, 53058, 55556, 57658, 2208, 10252, 10302, 14218, 33877, 10317, 10485, 25964, 14815, 1363, 1397, 14827, 21708, 3801, 64698, 2179 or 13249 protein, and the mixture incubated under conditions conducive to complex formation (e.g., at physiological conditions for salt and pH). Following incubation, the beads or microtitre plate wells are washed to remove any unbound components, the matrix immobilized in the case of beads, complex determined either directly or indirectly, for example, as described above. Alternatively, the complexes can be dissociated from the matrix, and the level of 15986, 2188, 20743, 9148, 9151, 9791, 44252, 14184, 42461, 8204, 7970, 25552, 21657, 26492, 2411, 15088, 1905, 28899, 63380, 33935, 10480, 12686, 25501, 17694, 15701, 53062, 49908, 21612, 38949, 6216, 46863, 9235, 2201, 6985, 9883, 12238, 18057, 21617, 39228, 49928, 54476, 62113, 64316, 12264, 32362, 58198, 2887, 3205, 8557, 9600, 9693, 44867, 53058, 55556, 57658, 2208, 10252, 10302, 14218, 33877, 10317, 10485, 25964, 14815, 1363, 1397, 14827, 21708, 3801, 64698, 2179 or 13249 binding or activity determined using standard techniques.

[0863] Other techniques for immobilizing proteins on matrices can also be used in the screening assays of the invention. For example, either a 15986, 2188, 20743, 9148, 9151, 9791, 44252, 14184, 42461, 8204, 7970, 25552, 21657, 26492, 2411, 15088, 1905, 28899, 63380, 33935, 10480, 12686, 25501, 17694, 15701, 53062, 49908, 21612, 38949, 6216, 46863, 9235, 2201, 6985, 9883, 12238, 18057, 21617, 39228, 49928, 54476, 62113, 64316, 12264, 32362, 58198, 2887, 3205, 8557, 9600, 9693, 44867, 53058, 55556, 57658, 2208, 10252, 10302, 14218, 33877, 10317, 10485, 25964, 14815, 1363, 1397, 14827, 21708, 3801, 64698, 2179 or 13249 protein or a 15986, 2188, 20743, 9148, 9151, 9791, 44252, 14184, 42461, 8204, 7970, 25552, 21657, 26492, 2411, 15088, 1905, 28899, 63380, 33935, 10480, 12686, 25501, 17694, 15701, 53062, 49908, 21612, 38949, 6216, 46863, 9235, 2201, 6985, 9883, 12238, 18057, 21617, 39228, 49928, 54476, 62113, 64316, 12264, 32362, 58198, 2887, 3205, 8557, 9600, 9693, 44867, 53058, 55556, 57658, 2208, 10252, 10302, 14218, 33877, 10317, 10485, 25964, 14815, 1363, 1397, 14827, 21708, 3801, 64698, 2179 or 13249 target molecule can be immobilized utilizing conjugation of biotin and streptavidin. Biotinylated 15986, 2188, 20743, 9148, 9151, 9791, 44252, 14184, 42461, 8204, 7970, 25552, 21657, 26492, 2411, 15088, 1905, 28899, 63380, 33935, 10480, 12686, 25501, 17694, 15701, 53062, 49908, 21612, 38949, 6216, 46863, 9235, 2201, 6985, 9883, 12238, 18057, 21617, 39228, 49928, 54476, 62113, 64316, 12264, 32362, 58198, 2887, 3205, 8557, 9600, 9693, 44867, 53058, 55556, 57658, 2208, 10252, 10302, 14218, 33877, 10317, 10485, 25964, 14815, 1363, 1397, 14827, 21708, 3801, 64698, 2179 or 13249 protein or target molecules can be prepared from biotin-NHS(N-hydroxy-succinimide) using techniques known in the art (e.g., biotinylation kit, Pierce Chemicals, Rockford, Ill.), and immobilized in the wells of streptavidin-coated 96 well plates (Pierce Chemical). Alternatively, antibodies reactive with 15986, 2188, 20743, 9148, 9151, 9791, 44252, 14184, 42461, 8204, 7970, 25552, 21657, 26492, 2411, 15088, 1905, 28899, 63380, 33935, 10480, 12686, 25501, 17694, 15701, 53062, 49908, 21612, 38949, 6216, 46863, 9235, 2201, 6985, 9883, 12238, 18057, 21617, 39228, 49928, 54476, 62113, 64316, 12264, 32362, 58198, 2887, 3205, 8557, 9600, 9693, 44867, 53058, 55556, 57658, 2208, 10252, 10302, 14218, 33877, 10317, 10485, 25964, 14815, 1363, 1397, 14827, 21708, 3801, 64698, 2179 or 13249 protein or target molecules but which do not interfere with binding of the 15986, 2188, 20743, 9148, 9151, 9791, 44252, 14184, 42461, 8204, 7970, 25552, 21657, 26492, 2411, 15088, 1905, 28899, 63380, 33935, 10480, 12686, 25501, 17694, 15701, 53062, 49908, 21612, 38949, 6216, 46863, 9235, 2201, 6985, 9883, 12238, 18057, 21617, 39228, 49928, 54476, 62113, 64316, 12264, 32362, 58198, 2887, 3205, 8557, 9600, 9693, 44867, 53058, 55556, 57658, 2208, 10252, 10302, 14218, 33877, 10317, 10485, 25964, 14815, 1363, 1397, 14827, 21708, 3801, 64698, 2179 or 13249 protein to its target molecule can be derivatized to the wells of the plate, and unbound target or 15986, 2188, 20743, 9148, 9151, 9791, 44252, 14184, 42461, 8204, 7970, 25552, 21657, 26492, 2411, 15088, 1905, 28899, 63380, 33935, 10480, 12686, 25501, 17694, 15701, 53062, 49908, 21612, 38949, 6216, 46863, 9235, 2201, 6985, 9883, 12238, 18057, 21617, 39228, 49928, 54476, 62113, 64316, 12264, 32362, 58198, 2887, 3205, 8557, 9600, 9693, 44867, 53058, 55556, 57658, 2208, 10252, 10302, 14218, 33877, 10317, 10485, 25964, 14815, 1363, 1397, 14827, 21708, 3801, 64698, 2179 or 13249 protein trapped in the wells by antibody conjugation. Methods for detecting such complexes, in addition to those described above for the GST-immobilized complexes, include immunodetection of complexes using antibodies reactive with the 15986, 2188, 20743, 9148, 9151, 9791, 44252, 14184, 42461, 8204, 7970, 25552, 21657, 26492, 2411, 15088, 1905, 28899, 63380, 33935, 10480, 12686, 25501, 17694, 15701, 53062, 49908, 21612, 38949, 6216, 46863, 9235, 2201, 6985, 9883, 12238, 18057, 21617, 39228, 49928, 54476, 62113, 64316, 12264, 32362, 58198, 2887, 3205, 8557, 9600, 9693, 44867, 53058, 55556, 57658, 2208, 10252, 10302, 14218, 33877, 10317, 10485, 25964, 14815, 1363, 1397, 14827, 21708, 3801, 64698, 2179 or 13249 protein or target molecule, as well as enzyme-linked assays which rely on detecting an enzymatic activity associated with the 15986, 2188, 20743, 9148, 9151, 9791, 44252, 14184, 42461, 8204, 7970, 25552, 21657, 26492, 2411, 15088, 1905, 28899, 63380, 33935, 10480, 12686, 25501, 17694, 15701, 53062, 49908, 21612, 38949, 6216, 46863, 9235, 2201, 6985, 9883, 12238, 18057, 21617, 39228, 49928, 54476, 62113, 64316, 12264, 32362, 58198, 2887, 3205, 8557, 9600, 9693, 44867, 53058, 55556, 57658, 2208, 10252, 10302, 14218, 33877, 10317, 10485, 25964, 14815, 1363, 1397, 14827, 21708, 3801, 64698, 2179 or 13249 protein or target molecule.

[0864] In another embodiment, modulators of 15986, 2188, 20743, 9148, 9151, 9791, 44252, 14184, 42461, 8204, 7970, 25552, 21657, 26492, 2411, 15088, 1905, 28899, 63380, 33935, 10480, 12686, 25501, 17694, 15701, 53062, 49908, 21612, 38949, 6216, 46863, 9235, 2201, 6985, 9883, 12238, 18057, 21617, 39228, 49928, 54476, 62113, 64316, 12264, 32362, 58198, 2887, 3205, 8557, 9600, 9693, 44867, 53058, 55556, 57658, 2208, 10252, 10302, 14218, 33877, 10317, 10485, 25964, 14815, 1363, 1397, 14827, 21708, 3801, 64698, 2179 or 13249 expression are identified in a method wherein a cell is contacted with a candidate compound and the expression of 15986, 2188, 20743, 9148, 9151, 9791, 44252, 14184, 42461, 8204, 7970, 25552, 21657, 26492, 2411, 15088, 1905, 28899, 63380, 33935, 10480, 12686, 25501, 17694, 15701, 53062, 49908, 21612, 38949, 6216, 46863, 9235, 2201, 6985, 9883, 12238, 18057, 21617, 39228, 49928, 54476, 62113, 64316, 12264, 32362, 58198, 2887, 3205, 8557, 9600, 9693, 44867, 53058, 55556, 57658, 2208, 10252, 10302, 14218, 33877, 10317, 10485, 25964, 14815, 1363, 1397, 14827, 21708, 3801, 64698, 2179 or 13249 mRNA or protein in the cell is determined. The level of expression of 15986, 2188, 20743, 9148, 9151, 9791, 44252, 14184, 42461, 8204, 7970, 25552, 21657, 26492, 2411, 15088, 1905, 28899, 63380, 33935, 10480, 12686, 25501, 17694, 15701, 53062, 49908, 21612, 38949, 6216, 46863, 9235, 2201, 6985, 9883, 12238, 18057, 21617, 39228, 49928, 54476, 62113, 64316, 12264, 32362, 58198, 2887, 3205, 8557, 9600, 9693, 44867, 53058, 55556, 57658, 2208, 10252, 10302, 14218, 33877, 10317, 10485, 25964, 14815, 1363, 1397, 14827, 21708, 3801, 64698, 2179 or 13249 mRNA or protein in the presence of the candidate compound is compared to the level of expression of 15986, 2188, 20743, 9148, 9151, 9791, 44252, 14184, 42461, 8204, 7970, 25552, 21657, 26492, 2411, 15088, 1905, 28899, 63380, 33935, 10480, 12686, 25501, 17694, 15701, 53062, 49908, 21612, 38949, 6216, 46863, 9235, 2201, 6985, 9883, 12238, 18057, 21617, 39228, 49928, 54476, 62113, 64316, 12264, 32362, 58198, 2887, 3205, 8557, 9600, 9693, 44867, 53058, 55556, 57658, 2208, 10252, 10302, 14218, 33877, 10317, 10485, 25964, 14815, 1363, 1397, 14827, 21708, 3801, 64698, 2179 or 13249 mRNA or protein in the absence of the candidate compound. The candidate compound can then be identified as a modulator of 15986, 2188, 20743, 9148, 9151, 9791, 44252, 14184, 42461, 8204, 7970, 25552, 21657, 26492, 2411, 15088, 1905, 28899, 63380, 33935, 10480, 12686, 25501, 17694, 15701, 53062, 49908, 21612, 38949, 6216, 46863, 9235, 2201, 6985, 9883, 12238, 18057, 21617, 39228, 49928, 54476, 62113, 64316, 12264, 32362, 58198, 2887, 3205, 8557, 9600, 9693, 44867, 53058, 55556, 57658, 2208, 10252, 10302, 14218, 33877, 10317, 10485, 25964, 14815, 1363, 1397, 14827, 21708, 3801, 64698, 2179 or 13249 expression based on this comparison. For example, when expression of 15986, 2188, 20743, 9148, 9151, 9791, 44252, 14184, 42461, 8204, 7970, 25552, 21657, 26492, 2411, 15088, 1905, 28899, 63380, 33935, 10480, 12686, 25501, 17694, 15701, 53062, 49908, 21612, 38949, 6216, 46863, 9235, 2201, 6985, 9883, 12238, 18057, 21617, 39228, 49928, 54476, 62113, 64316, 12264, 32362, 58198, 2887, 3205, 8557, 9600, 9693, 44867, 53058, 55556, 57658, 2208, 10252, 10302, 14218, 33877, 10317, 10485, 25964, 14815, 1363, 1397, 14827, 21708, 3801, 64698, 2179 or 13249 mRNA or protein is greater (statistically significantly greater) in the presence of the candidate compound than in its absence, the candidate compound is identified as a stimulator of 15986, 2188, 20743, 9148, 9151, 9791, 44252, 14184, 42461, 8204, 7970, 25552, 21657, 26492, 2411, 15088, 1905, 28899, 63380, 33935, 10480, 12686, 25501, 17694, 15701, 53062, 49908, 21612, 38949, 6216, 46863, 9235, 2201, 6985, 9883, 12238, 18057, 21617, 39228, 49928, 54476, 62113, 64316, 12264, 32362, 58198, 2887, 3205, 8557, 9600, 9693, 44867, 53058, 55556, 57658, 2208, 10252, 10302, 14218, 33877, 10317, 10485, 25964, 14815, 1363, 1397, 14827, 21708, 3801, 64698, 2179 or 13249 mRNA or protein expression. Alternatively, when expression of 15986, 2188, 20743, 9148, 9151, 9791, 44252, 14184, 42461, 8204, 7970, 25552, 21657, 26492, 2411, 15088, 1905, 28899, 63380, 33935, 10480, 12686, 25501, 17694, 15701, 53062, 49908, 21612, 38949, 6216, 46863, 9235, 2201, 6985, 9883, 12238, 18057, 21617, 39228, 49928, 54476, 62113, 64316, 12264, 32362, 58198, 2887, 3205, 8557, 9600, 9693, 44867, 53058, 55556, 57658, 2208, 10252, 10302, 14218, 33877, 10317, 10485, 25964, 14815, 1363, 1397, 14827, 21708, 3801, 64698, 2179 or 13249 mRNA or protein is less (statistically significantly less) in the presence of the candidate compound than in its absence, the candidate compound is identified as an inhibitor of 15986, 2188, 20743, 9148, 9151, 9791, 44252, 14184, 42461, 8204, 7970, 25552, 21657, 26492, 2411, 15088, 1905, 28899, 63380, 33935, 10480, 12686, 25501, 17694, 15701, 53062, 49908, 21612, 38949, 6216, 46863, 9235, 2201, 6985, 9883, 12238, 18057, 21617, 39228, 49928, 54476, 62113, 64316, 12264, 32362, 58198, 2887, 3205, 8557, 9600, 9693, 44867, 53058, 55556, 57658, 2208, 10252, 10302, 14218, 33877, 10317, 10485, 25964, 14815, 1363, 1397, 14827, 21708, 3801, 64698, 2179 or 13249 mRNA or protein expression. The level of 15986, 2188, 20743, 9148, 9151, 9791, 44252, 14184, 42461, 8204, 7970, 25552, 21657, 26492, 2411, 15088, 1905, 28899, 63380, 33935, 10480, 12686, 25501, 17694, 15701, 53062, 49908, 21612, 38949, 6216, 46863, 9235, 2201, 6985, 9883, 12238, 18057, 21617, 39228, 49928, 54476, 62113, 64316, 12264, 32362, 58198, 2887, 3205, 8557, 9600, 9693, 44867, 53058, 55556, 57658, 2208, 10252, 10302, 14218, 33877, 10317, 10485, 25964, 14815, 1363, 1397, 14827, 21708, 3801, 64698, 2179 or 13249 mRNA or protein expression in the cells can be determined by methods described herein for detecting 15986, 2188, 20743, 9148, 9151, 9791, 44252, 14184, 42461, 8204, 7970, 25552, 21657, 26492, 2411, 15088, 1905, 28899, 63380, 33935, 10480, 12686, 25501, 17694, 15701, 53062, 49908, 21612, 38949, 6216, 46863, 9235, 2201, 6985, 9883, 12238, 18057, 21617, 39228, 49928, 54476, 62113, 64316, 12264, 32362, 58198, 2887, 3205, 8557, 9600, 9693, 44867, 53058, 55556, 57658, 2208, 10252, 10302, 14218, 33877, 10317, 10485, 25964, 14815, 1363, 1397, 14827, 21708, 3801, 64698, 2179 or 13249 mRNA or protein.

[0865] In yet another aspect of the invention, the 15986, 2188, 20743, 9148, 9151, 9791, 44252, 14184, 42461, 8204, 7970, 25552, 21657, 26492, 2411, 15088, 1905, 28899, 63380, 33935, 10480, 12686, 25501, 17694, 15701, 53062, 49908, 21612, 38949, 6216, 46863, 9235, 2201, 6985, 9883, 12238, 18057, 21617, 39228, 49928, 54476, 62113, 64316, 12264, 32362, 58198, 2887, 3205, 8557, 9600, 9693, 44867, 53058, 55556, 57658, 2208, 10252, 10302, 14218, 33877, 10317, 10485, 25964, 14815, 1363, 1397, 14827, 21708, 3801, 64698, 2179 or 13249 proteins can be used as “bait proteins” in a two-hybrid assay or three-hybrid assay (see, e.g., U.S. Pat. No. 5,283,317; Zervos et al. (1993) Cell 72:223-232; Madura et al. (1993) J. Biol. Chem. 268:12046-12054; Bartel et al. (1993) Biotechniques 14:920-924; Iwabuchi et al. (1993) Oncogene 8:1693-1696; and Brent WO94/10300), to identify other proteins, which bind to or interact with 15986, 2188, 20743, 9148, 9151, 9791, 44252, 14184, 42461, 8204, 7970, 25552, 21657, 26492, 2411, 15088, 1905, 28899, 63380, 33935, 10480, 12686, 25501, 17694, 15701, 53062, 49908, 21612, 38949, 6216, 46863, 9235, 2201, 6985, 9883, 12238, 18057, 21617, 39228, 49928, 54476, 62113, 64316, 12264, 32362, 58198, 2887, 3205, 8557, 9600, 9693, 44867, 53058, 55556, 57658, 2208, 10252, 10302, 14218, 33877, 10317, 10485, 25964, 14815, 1363, 1397, 14827, 21708, 3801, 64698, 2179 or 13249, (“15986, 2188, 20743, 9148, 9151, 9791, 44252, 14184, 42461, 8204, 7970, 25552, 21657, 26492, 2411, 15088, 1905, 28899, 63380, 33935, 10480, 12686, 25501, 17694, 15701, 53062, 49908, 21612, 38949, 6216, 46863, 9235, 2201, 6985, 9883, 12238, 18057, 21617, 39228, 49928, 54476, 62113, 64316, 12264, 32362, 58198, 2887, 3205, 8557, 9600, 9693, 44867, 53058, 55556, 57658, 2208, 10252, 10302, 14218, 33877, 10317, 10485, 25964, 14815, 1363, 1397, 14827, 21708, 3801, 64698, 2179 or 13249-binding proteins” or “15986, 2188, 20743, 9148, 9151, 9791, 44252, 14184, 42461, 8204, 7970, 25552, 21657, 26492, 2411, 15088, 1905, 28899, 63380, 33935, 10480, 12686, 25501, 17694, 15701, 53062, 49908, 21612, 38949, 6216, 46863, 9235, 2201, 6985, 9883, 12238, 18057, 21617, 39228, 49928, 54476, 62113, 64316, 12264, 32362, 58198, 2887, 3205, 8557, 9600, 9693, 44867, 53058, 55556, 57658, 2208, 10252, 10302, 14218, 33877, 10317, 10485, 25964, 14815, 1363, 1397, 14827, 21708, 3801, 64698, 2179 or 13249-bp”) and are involved in 15986, 2188, 20743, 9148, 9151, 9791, 44252, 14184, 42461, 8204, 7970, 25552, 21657, 26492, 2411, 15088, 1905, 28899, 63380, 33935, 10480, 12686, 25501, 17694, 15701, 53062, 49908, 21612, 38949, 6216, 46863, 9235, 2201, 6985, 9883, 12238, 18057, 21617, 39228, 49928, 54476, 62113, 64316, 12264, 32362, 58198, 2887, 3205, 8557, 9600, 9693, 44867, 53058, 55556, 57658, 2208, 10252, 10302, 14218, 33877, 10317, 10485, 25964, 14815, 1363, 1397, 14827, 21708, 3801, 64698, 2179 or 13249 activity. Such 15986, 2188, 20743, 9148, 9151, 9791, 44252, 14184, 42461, 8204, 7970, 25552, 21657, 26492, 2411, 15088, 1905, 28899, 63380, 33935, 10480, 12686, 25501, 17694, 15701, 53062, 49908, 21612, 38949, 6216, 46863, 9235, 2201, 6985, 9883, 12238, 18057, 21617, 39228, 49928, 54476, 62113, 64316, 12264, 32362, 58198, 2887, 3205, 8557, 9600, 9693, 44867, 53058, 55556, 57658, 2208, 10252, 10302, 14218, 33877, 10317, 10485, 25964, 14815, 1363, 1397, 14827, 21708, 3801, 64698, 2179 or 13249-binding proteins are also likely to be involved in the propagation of signals by the 15986, 2188, 20743, 9148, 9151, 9791, 44252, 14184, 42461, 8204, 7970, 25552, 21657, 26492, 2411, 15088, 1905, 28899, 63380, 33935, 10480, 12686, 25501, 17694, 15701, 53062, 49908, 21612, 38949, 6216, 46863, 9235, 2201, 6985, 9883, 12238, 18057, 21617, 39228, 49928, 54476, 62113, 64316, 12264, 32362, 58198, 2887, 3205, 8557, 9600, 9693, 44867, 53058, 55556, 57658, 2208, 10252, 10302, 14218, 33877, 10317, 10485, 25964, 14815, 1363, 1397, 14827, 21708, 3801, 64698, 2179 or 13249 proteins or 15986, 2188, 20743, 9148, 9151, 9791, 44252, 14184, 42461, 8204, 7970, 25552, 21657, 26492, 2411, 15088, 1905, 28899, 63380, 33935, 10480, 12686, 25501, 17694, 15701, 53062, 49908, 21612, 38949, 6216, 46863, 9235, 2201, 6985, 9883, 12238, 18057, 21617, 39228, 49928, 54476, 62113, 64316, 12264, 32362, 58198, 2887, 3205, 8557, 9600, 9693, 44867, 53058, 55556, 57658, 2208, 10252, 10302, 14218, 33877, 10317, 10485, 25964, 14815, 1363, 1397, 14827, 21708, 3801, 64698, 2179 or 13249 targets as, for example, downstream elements of a 15986, 2188, 20743, 9148, 9151, 9791, 44252, 14184, 42461, 8204, 7970, 25552, 21657, 26492, 2411, 15088, 1905, 28899, 63380, 33935, 10480, 12686, 25501, 17694, 15701, 53062, 49908, 21612, 38949, 6216, 46863, 9235, 2201, 6985, 9883, 12238, 18057, 21617, 39228, 49928, 54476, 62113, 64316, 12264, 32362, 58198, 2887, 3205, 8557, 9600, 9693, 44867, 53058, 55556, 57658, 2208, 10252, 10302, 14218, 33877, 10317, 10485, 25964, 14815, 1363, 1397, 14827, 21708, 3801, 64698, 2179 or 13249-mediated signaling pathway. Alternatively, such 15986, 2188, 20743, 9148, 9151, 9791, 44252, 14184, 42461, 8204, 7970, 25552, 21657, 26492, 2411, 15088, 1905, 28899, 63380, 33935, 10480, 12686, 25501, 17694, 15701, 53062, 49908, 21612, 38949, 6216, 46863, 9235, 2201, 6985, 9883, 12238, 18057, 21617, 39228, 49928, 54476, 62113, 64316, 12264, 32362, 58198, 2887, 3205, 8557, 9600, 9693, 44867, 53058, 55556, 57658, 2208, 10252, 10302, 14218, 33877, 10317, 10485, 25964, 14815, 1363, 1397, 14827, 21708, 3801, 64698, 2179 or 13249-binding proteins are likely to be 15986, 2188, 20743, 9148, 9151, 9791, 44252, 14184, 42461, 8204, 7970, 25552, 21657, 26492, 2411, 15088, 1905, 28899, 63380, 33935, 10480, 12686, 25501, 17694, 15701, 53062, 49908, 21612, 38949, 6216, 46863, 9235, 2201, 6985, 9883, 12238, 18057, 21617, 39228, 49928, 54476, 62113, 64316, 12264, 32362, 58198, 2887, 3205, 8557, 9600, 9693, 44867, 53058, 55556, 57658, 2208, 10252, 10302, 14218, 33877, 10317, 10485, 25964, 14815, 1363, 1397, 14827, 21708, 3801, 64698, 2179 or 13249 inhibitors.

[0866] The two-hybrid system is based on the modular nature of most transcription factors, which consist of separable DNA-binding and activation domains. Briefly, the assay utilizes two different DNA constructs. In one construct, the gene that codes for a 15986, 2188, 20743, 9148, 9151, 9791, 44252, 14184, 42461, 8204, 7970, 25552, 21657, 26492, 2411, 15088, 1905, 28899, 63380, 33935, 10480, 12686, 25501, 17694, 15701, 53062, 49908, 21612, 38949, 6216, 46863, 9235, 2201, 6985, 9883, 12238, 18057, 21617, 39228, 49928, 54476, 62113, 64316, 12264, 32362, 58198, 2887, 3205, 8557, 9600, 9693, 44867, 53058, 55556, 57658, 2208, 10252, 10302, 14218, 33877, 10317, 10485, 25964, 14815, 1363, 1397, 14827, 21708, 3801, 64698, 2179 or 13249 protein is fused to a gene encoding the DNA binding domain of a known transcription factor (e.g., GAL-4). In the other construct, a DNA sequence, from a library of DNA sequences, that encodes an unidentified protein (“prey” or “sample”) is fused to a gene that codes for the activation domain of the known transcription factor. If the “bait” and the “prey” proteins are able to interact, in vivo, forming a 15986, 2188, 20743, 9148, 9151, 9791, 44252, 14184, 42461, 8204, 7970, 25552, 21657, 26492, 2411, 15088, 1905, 28899, 63380, 33935, 10480, 12686, 25501, 17694, 15701, 53062, 49908, 21612, 38949, 6216, 46863, 9235, 2201, 6985, 9883, 12238, 18057, 21617, 39228, 49928, 54476, 62113, 64316, 12264, 32362, 58198, 2887, 3205, 8557, 9600, 9693, 44867, 53058, 55556, 57658, 2208, 10252, 10302, 14218, 33877, 10317, 10485, 25964, 14815, 1363, 1397, 14827, 21708, 3801, 64698, 2179 or 13249-dependent complex, the DNA-binding and activation domains of the transcription factor are brought into close proximity. This proximity allows transcription of a reporter gene (e.g., LacZ) which is operably linked to a transcriptional regulatory site responsive to the transcription factor. Expression of the reporter gene can be detected and cell colonies containing the functional transcription factor can be isolated and used to obtain the cloned gene which encodes the protein which interacts with the 15986, 2188, 20743, 9148, 9151, 9791, 44252, 14184, 42461, 8204, 7970, 25552, 21657, 26492, 2411, 15088, 1905, 28899, 63380, 33935, 10480, 12686, 25501, 17694, 15701, 53062, 49908, 21612, 38949, 6216, 46863, 9235, 2201, 6985, 9883, 12238, 18057, 21617, 39228, 49928, 54476, 62113, 64316, 12264, 32362, 58198, 2887, 3205, 8557, 9600, 9693, 44867, 53058, 55556, 57658, 2208, 10252, 10302, 14218, 33877, 10317, 10485, 25964, 14815, 1363, 1397, 14827, 21708, 3801, 64698, 2179 or 13249 protein.

[0867] In another aspect, the invention pertains to a combination of two or more of the assays described herein. For example, a modulating agent can be identified using a cell-based or a cell free assay, and the ability of the agent to modulate the activity of a 15986, 2188, 20743, 9148, 9151, 9791, 44252, 14184, 42461, 8204, 7970, 25552, 21657, 26492, 2411, 15088, 1905, 28899, 63380, 33935, 10480, 12686, 25501, 17694, 15701, 53062, 49908, 21612, 38949, 6216, 46863, 9235, 2201, 6985, 9883, 12238, 18057, 21617, 39228, 49928, 54476, 62113, 64316, 12264, 32362, 58198, 2887, 3205, 8557, 9600, 9693, 44867, 53058, 55556, 57658, 2208, 10252, 10302, 14218, 33877, 10317, 10485, 25964, 14815, 1363, 1397, 14827, 21708, 3801, 64698, 2179 or 13249 protein can be confirmed in vivo, e.g., in an animal such as an animal model for a cancer, as described herein.

[0868] This invention further pertains to novel agents identified by the above-described screening assays. Accordingly, it is within the scope of this invention to further use an agent identified as described herein in an appropriate animal model. For example, an agent identified as described herein (e.g., a 15986, 2188, 20743, 9148, 9151, 9791, 44252, 14184, 42461, 8204, 7970, 25552, 21657, 26492, 2411, 15088, 1905, 28899, 63380, 33935, 10480, 12686, 25501, 17694, 15701, 53062, 49908, 21612, 38949, 6216, 46863, 9235, 2201, 6985, 9883, 12238, 18057, 21617, 39228, 49928, 54476, 62113, 64316, 12264, 32362, 58198, 2887, 3205, 8557, 9600, 9693, 44867, 53058, 55556, 57658, 2208, 10252, 10302, 14218, 33877, 10317, 10485, 25964, 14815, 1363, 1397, 14827, 21708, 3801, 64698, 2179 or 13249 modulating agent, an antisense 15986, 2188, 20743, 9148, 9151, 9791, 44252, 14184, 42461, 8204, 7970, 25552, 21657, 26492, 2411, 15088, 1905, 28899, 63380, 33935, 10480, 12686, 25501, 17694, 15701, 53062, 49908, 21612, 38949, 6216, 46863, 9235, 2201, 6985, 9883, 12238, 18057, 21617, 39228, 49928, 54476, 62113, 64316, 12264, 32362, 58198, 2887, 3205, 8557, 9600, 9693, 44867, 53058, 55556, 57658, 2208, 10252, 10302, 14218, 33877, 10317, 10485, 25964, 14815, 1363, 1397, 14827, 21708, 3801, 64698, 2179 or 13249 nucleic acid molecule, a 15986, 2188, 20743, 9148, 9151, 9791, 44252, 14184, 42461, 8204, 7970, 25552, 21657, 26492, 2411, 15088, 1905, 28899, 63380, 33935, 10480, 12686, 25501, 17694, 15701, 53062, 49908, 21612, 38949, 6216, 46863, 9235, 2201, 6985, 9883, 12238, 18057, 21617, 39228, 49928, 54476, 62113, 64316, 12264, 32362, 58198, 2887, 3205, 8557, 9600, 9693, 44867, 53058, 55556, 57658, 2208, 10252, 10302, 14218, 33877, 10317, 10485, 25964, 14815, 1363, 1397, 14827, 21708, 3801, 64698, 2179 or 13249-specific antibody, or a 15986, 2188, 20743, 9148, 9151, 9791, 44252, 14184, 42461, 8204, 7970, 25552, 21657, 26492, 2411, 15088, 1905, 28899, 63380, 33935, 10480, 12686, 25501, 17694, 15701, 53062, 49908, 21612, 38949, 6216, 46863, 9235, 2201, 6985, 9883, 12238, 18057, 21617, 39228, 49928, 54476, 62113, 64316, 12264, 32362, 58198, 2887, 3205, 8557, 9600, 9693, 44867, 53058, 55556, 57658, 2208, 10252, 10302, 14218, 33877, 10317, 10485, 25964, 14815, 1363, 1397, 14827, 21708, 3801, 64698, 2179 or 13249-binding partner) can be used in an animal model to determine the efficacy, toxicity, or side effects of treatment with such an agent. Alternatively, an agent identified as described herein can be used in an animal model to determine the mechanism of action of such an agent. Furthermore, this invention pertains to uses of novel agents identified by the above-described screening assays for treatments as described herein.

[0869] Any of the compounds, including but not limited to compounds such as those identified in the foregoing assay systems, may be tested for the ability to ameliorate at least one symptom of a cancer. Cell-based and animal model-based assays for the identification of compounds exhibiting such an ability to ameliorate at least one symptom of a cancer are described herein.

[0870] In addition, animal-based models of a cancer, such as those described herein, may be used to identify compounds capable of treating a cancer. Such animal models may be used as test substrates for the identification of drugs, pharmaceuticals, therapies, and interventions which may be effective in treating a cancer. For example, animal models may be exposed to a compound, suspected of exhibiting an ability to treat a cancer, at a sufficient concentration and for a time sufficient to elicit such an amelioration of at least one symptom of a cancer in the exposed animals. The response of the animals to the exposure may be monitored by assessing the reversal of the symptoms of a cancer before and after treatment.

[0871] With regard to intervention, any treatments which reverse any aspect of a cancer (i.e. have an effect on a cancer including but not limited to cancers of the lung, ovary, prostate, breast, colon or other disease state characterized by modulation of angiogenesis) should be considered as candidates for a human cancer therapeutic intervention. Dosages of test agents may be determined by deriving dose-response curves.

[0872] Additionally, gene expression patterns may be utilized to assess the ability of a compound to ameliorate at least one symptom of a cancer. For example, the expression pattern of one or more genes may form part of a “gene expression profile” or “transcriptional profile” which may be then be used in such an assessment. “Gene expression profile” or “transcriptional profile”, as used herein, includes the pattern of mRNA expression obtained for a given tissue or cell type under a given set of conditions. Gene expression profiles may be generated, for example, by utilizing a differential display procedure, Northern analysis and/or RT-PCR. In one embodiment, 15986, 2188, 20743, 9148, 9151, 9791, 44252, 14184, 42461, 8204, 7970, 25552, 21657, 26492, 2411, 15088, 1905, 28899, 63380, 33935, 10480, 12686, 25501, 17694, 15701, 53062, 49908, 21612, 38949, 6216, 46863, 9235, 2201, 6985, 9883, 12238, 18057, 21617, 39228, 49928, 54476, 62113, 64316, 12264, 32362, 58198, 2887, 3205, 8557, 9600, 9693, 44867, 53058, 55556, 57658, 2208, 10252, 10302, 14218, 33877, 10317, 10485, 25964, 14815, 1363, 1397, 14827, 21708, 3801, 64698, 2179 or 13249 gene sequences may be used as probes and/or PCR primers for the generation and corroboration of such gene expression profiles.

[0873] Gene expression profiles may be characterized for known states, either cancer or normal, within the cell- and/or animal-based model systems. Subsequently, these known gene expression profiles may be compared to ascertain the effect a test compound has to modify such gene expression profiles, and to cause the profile to more closely resemble that of a more desirable profile.

[0874] For example, administration of a compound may cause the gene expression profile of a cancer disease model system to more closely resemble the control system. Administration of a compound may, alternatively, cause the gene expression profile of a control system to begin to mimic a cancer or a cancer disease state. Such a compound may, for example, be used in further characterizing the compound of interest, or may be used in the generation of additional animal models.

[0875] Cell- and Animal-Based Model Systems

[0876] Described herein are cell- and animal-based systems which act as models for cancer. These systems may be used in a variety of applications. For example, the cell- and animal-based model systems may be used to further characterize differentially expressed genes associated with a cancer, e.g., 15986, 2188, 20743, 9148, 9151, 9791, 44252, 14184, 42461, 8204, 7970, 25552, 21657, 26492, 2411, 15088, 1905, 28899, 63380, 33935, 10480, 12686, 25501, 17694, 15701, 53062, 49908, 21612, 38949, 6216, 46863, 9235, 2201, 6985, 9883, 12238, 18057, 21617, 39228, 49928, 54476, 62113, 64316, 12264, 32362, 58198, 2887, 3205, 8557, 9600, 9693, 44867, 53058, 55556, 57658, 2208, 10252, 10302, 14218, 33877, 10317, 10485, 25964, 14815, 1363, 1397, 14827, 21708, 3801, 64698, 2179 or 13249. In addition, animal- and cell-based assays may be used as part of screening strategies designed to identify compounds which are capable of ameliorating at least one symptom of a cancer, as described, below. Thus, the animal- and cell-based models may be used to identify drugs, pharmaceuticals, therapies and interventions which may be effective in treating a cancer. Furthermore, such animal models may be used to determine the LD50 and the ED50 in animal subjects, and such data can be used to determine the in vivo efficacy of potential cancer treatments.

[0877] Animal-Based Systems

[0878] Animal-based model systems of cancer may include, but are not limited to, non-recombinant and engineered transgenic animals.

[0879] Non-recombinant animal models for cancer may include, for example, genetic models.

[0880] Models for studying angiogenesis in vivo include tumor cell-induced angiogenesis and tumor metastasis (Hoffman, R M (1998-99) Cancer Metastasis Rev. 17:271-277; Holash, J et al. (1999) Oncogene 18:5356-5362; Li, C Y et al. (2000) J. Natl Cancer Inst. 92:143-147), matrix induced angiogenesis (U.S. Pat. No. 5,382,514), the disc angiogenesis system (Kowalski, J. et al. (1992) Exp. Mol. Pathol. 56:1-19), the rodent mesenteric-window angiogenesis assay (Norrby, K (1992) EXS 61:282-286), experimental choroidal neovascularization in the rat (Shen, W Y et al. (1998) Br. J. Ophthalmol. 82:1063-1071), and the chick embryo development (Brooks, P C et al. Methods Mol. Biol. (1999) 129:257-269) and chick embryo chorioallantoic membrane (CAM) models (McNatt L G et al. (1999) J. Ocul. Pharmacol. Ther. 15:413-423; Ribatti, D et al. (1996) Int. J. Dev. Biol. 40:1189-1197), and are reviewed in Ribatti, D and Vacca, A (1999) Int. J. Biol. Markers 14:207-213.

[0881] Animal based models for studying tumorigenesis in vivo are well known in the art (reviewed in Animal Models of Cancer Predisposition Syndromes, Hiai, H and Hino, O (eds.) 1999, Progress in Experimental Tumor Research, Vol. 35; Clarke A R Carcinogenesis (2000) 21:43541) and include, for example, carcinogen-induced tumors (Rithidech, K et al. Mutat Res (1999) 428:33-39; Miller, M L et al. Environ Mol Mutagen (2000) 35:319-327), injection and/or transplantation of tumor cells into an animal, as well as animals bearing mutations in growth regulatory genes, for example, oncogenes (e.g., ras) (Arbeit, J M et al. Am J Pathol (1993) 142:1187-1197; Sinn, E et al. Cell (1987) 49:465-475; Thorgeirsson, S S et al. Toxicol Lett (2000) 112-113:553-555) and tumor suppressor genes (e.g., p53) (Vooijs, M et al. Oncogene (1999) 18:5293-5303; Clark A R Cancer Metast Rev (1995) 14:125-148; Kumar, T R et al. J Intern Med (1995) 238:233-238; Donehower, L A et al. (1992) Nature 356215-221). Furthermore, experimental model systems are available for the study of, for example, ovarian cancer (Hamilton, T C et al. Semin Oncol (1984) 11:285-298; Rahman, N A et al. Mol Cell Endocrinol (1998) 145:167-174; Beamer, W G et al. Toxicol Pathol (1998) 26:704-710), gastric cancer (Thompson, J et al. Int J Cancer (2000) 86:863-869; Fodde, R et al. Cytogenet Cell Genet (1999) 86:105-111), breast cancer (Li, M et al. Oncogene (2000) 19:1010-1019; Green, J E et al. Oncogene (2000) 19:1020-1027), melanoma (Satyamoorthy, K et al. Cancer Metast Rev (1999) 18:401-405), and prostate cancer (Shirai, T et al. Mutat Res (2000) 462:219-226; Bostwick, D G et al. Prostate (2000) 43:286-294).

[0882] Additionally, animal models exhibiting a cancer may be engineered by using, for example, 15986, 2188, 20743, 9148, 9151, 9791, 44252, 14184, 42461, 8204, 7970, 25552, 21657, 26492, 2411, 15088, 1905, 28899, 63380, 33935, 10480, 12686, 25501, 17694, 15701, 53062, 49908, 21612, 38949, 6216, 46863, 9235, 2201, 6985, 9883, 12238, 18057, 21617, 39228, 49928, 54476, 62113, 64316, 12264, 32362, 58198, 2887, 3205, 8557, 9600, 9693, 44867, 53058, 55556, 57658, 2208, 10252, 10302, 14218, 33877, 10317, 10485, 25964, 14815, 1363, 1397, 14827, 21708, 3801, 64698, 2179 or 13249 gene sequences described above, in conjunction with techniques for producing transgenic animals that are well known to those of skill in the art. For example, 15986, 2188, 20743, 9148, 9151, 9791, 44252, 14184, 42461, 8204, 7970, 25552, 21657, 26492, 2411, 15088, 1905, 28899, 63380, 33935, 10480, 12686, 25501, 17694, 15701, 53062, 49908, 21612, 38949, 6216, 46863, 9235, 2201, 6985, 9883, 12238, 18057, 21617, 39228, 49928, 54476, 62113, 64316, 12264, 32362, 58198, 2887, 3205, 8557, 9600, 9693, 44867, 53058, 55556, 57658, 2208, 10252, 10302, 14218, 33877, 10317, 10485, 25964, 14815, 1363, 1397, 14827, 21708, 3801, 64698, 2179 or 13249 gene sequences may be introduced into, and overexpressed in, the genome of the animal of interest, or, if endogenous 15986, 2188, 20743, 9148, 9151, 9791, 44252, 14184, 42461, 8204, 7970, 25552, 21657, 26492, 2411, 15088, 1905, 28899, 63380, 33935, 10480, 12686, 25501, 17694, 15701, 53062, 49908, 21612, 38949, 6216, 46863, 9235, 2201, 6985, 9883, 12238, 18057, 21617, 39228, 49928, 54476, 62113, 64316, 12264, 32362, 58198, 2887, 3205, 8557, 9600, 9693, 44867, 53058, 55556, 57658, 2208, 10252, 10302, 14218, 33877, 10317, 10485, 25964, 14815, 1363, 1397, 14827, 21708, 3801, 64698, 2179 or 13249 gene sequences are present, they may either be overexpressed or, alternatively, be disrupted in order to underexpress or inactivate 15986, 2188, 20743, 9148, 9151, 9791, 44252, 14184, 42461, 8204, 7970, 25552, 21657, 26492, 2411, 15088, 1905, 28899, 63380, 33935, 10480, 12686, 25501, 17694, 15701, 53062, 49908, 21612, 38949, 6216, 46863, 9235, 2201, 6985, 9883, 12238, 18057, 21617, 39228, 49928, 54476, 62113, 64316, 12264, 32362, 58198, 2887, 3205, 8557, 9600, 9693, 44867, 53058, 55556, 57658, 2208, 10252, 10302, 14218, 33877, 10317, 10485, 25964, 14815, 1363, 1397, 14827, 21708, 3801, 64698, 2179 or 13249 gene expression.

[0883] The host cells of the invention can also be used to produce non-human transgenic animals. For example, in one embodiment, a host cell of the invention is a fertilized oocyte or an embryonic stem cell into which 15986, 2188, 20743, 9148, 9151, 9791, 44252, 14184, 42461, 8204, 7970, 25552, 21657, 26492, 2411, 15088, 1905, 28899, 63380, 33935, 10480, 12686, 25501, 17694, 15701, 53062, 49908, 21612, 38949, 6216, 46863, 9235, 2201, 6985, 9883, 12238, 18057, 21617, 39228, 49928, 54476, 62113, 64316, 12264, 32362, 58198, 2887, 3205, 8557, 9600, 9693, 44867, 53058, 55556, 57658, 2208, 10252, 10302, 14218, 33877, 10317, 10485, 25964, 14815, 1363, 1397, 14827, 21708, 3801, 64698, 2179 or 13249-coding sequences have been introduced. Such host cells can then be used to create non-human transgenic animals in which exogenous 15986, 2188, 20743, 9148, 9151, 9791, 44252, 14184, 42461, 8204, 7970, 25552, 21657, 26492, 2411, 15088, 1905, 28899, 63380, 33935, 10480, 12686, 25501, 17694, 15701, 53062, 49908, 21612, 38949, 6216, 46863, 9235, 2201, 6985, 9883, 12238, 18057, 21617, 39228, 49928, 54476, 62113, 64316, 12264, 32362, 58198, 2887, 3205, 8557, 9600, 9693, 44867, 53058, 55556, 57658, 2208, 10252, 10302, 14218, 33877, 10317, 10485, 25964, 14815, 1363, 1397, 14827, 21708, 3801, 64698, 2179 or 13249 sequences have been introduced into their genome or homologous recombinant animals in which endogenous 15986, 2188, 20743, 9148, 9151, 9791, 44252, 14184, 42461, 8204, 7970, 25552, 21657, 26492, 2411, 15088, 1905, 28899, 63380, 33935, 10480, 12686, 25501, 17694, 15701, 53062, 49908, 21612, 38949, 6216, 46863, 9235, 2201, 6985, 9883, 12238, 18057, 21617, 39228, 49928, 54476, 62113, 64316, 12264, 32362, 58198, 2887, 3205, 8557, 9600, 9693, 44867, 53058, 55556, 57658, 2208, 10252, 10302, 14218, 33877, 10317, 10485, 25964, 14815, 1363, 1397, 14827, 21708, 3801, 64698, 2179 or 13249 sequences have been altered. Such animals are useful for studying the function and/or activity of a 15986, 2188, 20743, 9148, 9151, 9791, 44252, 14184, 42461, 8204, 7970, 25552, 21657, 26492, 2411, 15088, 1905, 28899, 63380, 33935, 10480, 12686, 25501, 17694, 15701, 53062, 49908, 21612, 38949, 6216, 46863, 9235, 2201, 6985, 9883, 12238, 18057, 21617, 39228, 49928, 54476, 62113, 64316, 12264, 32362, 58198, 2887, 3205, 8557, 9600, 9693, 44867, 53058, 55556, 57658, 2208, 10252, 10302, 14218, 33877, 10317, 10485, 25964, 14815, 1363, 1397, 14827, 21708, 3801, 64698, 2179 or 13249 and for identifying and/or evaluating modulators of 15986, 2188, 20743, 9148, 9151, 9791, 44252, 14184, 42461, 8204, 7970, 25552, 21657, 26492, 2411, 15088, 1905, 28899, 63380, 33935, 10480, 12686, 25501, 17694, 15701, 53062, 49908, 21612, 38949, 6216, 46863, 9235, 2201, 6985, 9883, 12238, 18057, 21617, 39228, 49928, 54476, 62113, 64316, 12264, 32362, 58198, 2887, 3205, 8557, 9600, 9693, 44867, 53058, 55556, 57658, 2208, 10252, 10302, 14218, 33877, 10317, 10485, 25964, 14815, 1363, 1397, 14827, 21708, 3801, 64698, 2179 or 13249 activity. As used herein, a “transgenic animal” is a non-human animal, preferably a mammal, more preferably a rodent such as a rat or mouse, in which one or more of the cells of the animal includes a transgene. Other examples of transgenic animals include non-human primates, sheep, dogs, cows, goats, chickens, amphibians, and the like. A transgene is exogenous DNA which is integrated into the genome of a cell from which a transgenic animal develops and which remains in the genome of the mature animal, thereby directing the expression of an encoded gene product in one or more cell types or tissues of the transgenic animal. As used herein, a “homologous recombinant animal” is a non-human animal, preferably a mammal, more preferably a mouse, in which an endogenous 15986, 2188, 20743, 9148, 9151, 9791, 44252, 14184, 42461, 8204, 7970, 25552, 21657, 26492, 2411, 15088, 1905, 28899, 63380, 33935, 10480, 12686, 25501, 17694, 15701, 53062, 49908, 21612, 38949, 6216, 46863, 9235, 2201, 6985, 9883, 12238, 18057, 21617, 39228, 49928, 54476, 62113, 64316, 12264, 32362, 58198, 2887, 3205, 8557, 9600, 9693, 44867, 53058, 55556, 57658, 2208, 10252, 10302, 14218, 33877, 10317, 10485, 25964, 14815, 1363, 1397, 14827, 21708, 3801, 64698, 2179 or 13249 gene has been altered by homologous recombination between the endogenous gene and an exogenous DNA molecule introduced into a cell of the animal, e.g., an embryonic cell of the animal, prior to development of the animal.

[0884] A transgenic animal used in the methods of the invention can be created by introducing a 15986, 2188, 20743, 9148, 9151, 9791, 44252, 14184, 42461, 8204, 7970, 25552, 21657, 26492, 2411, 15088, 1905, 28899, 63380, 33935, 10480, 12686, 25501, 17694, 15701, 53062, 49908, 21612, 38949, 6216, 46863, 9235, 2201, 6985, 9883, 12238, 18057, 21617, 39228, 49928, 54476, 62113, 64316, 12264, 32362, 58198, 2887, 3205, 8557, 9600, 9693, 44867, 53058, 55556, 57658, 2208, 10252, 10302, 14218, 33877, 10317, 10485, 25964, 14815, 1363, 1397, 14827, 21708, 3801, 64698, 2179 or 13249-encoding nucleic acid into the male pronuclei of a fertilized oocyte, e.g., by microinjection, retroviral infection, and allowing the oocyte to develop in a pseudopregnant female foster animal. The 15986, 2188, 20743, 9148, 9151, 9791, 44252, 14184, 42461, 8204, 7970, 25552, 21657, 26492, 2411, 15088, 1905, 28899, 63380, 33935, 10480, 12686, 25501, 17694, 15701, 53062, 49908, 21612, 38949, 6216, 46863, 9235, 2201, 6985, 9883, 12238, 18057, 21617, 39228, 49928, 54476, 62113, 64316, 12264, 32362, 58198, 2887, 3205, 8557, 9600, 9693, 44867, 53058, 55556, 57658, 2208, 10252, 10302, 14218, 33877, 10317, 10485, 25964, 14815, 1363, 1397, 14827, 21708, 3801, 64698, 2179 or 13249 cDNA sequence can be introduced as a transgene into the genome of a non-human animal. Alternatively, a nonhuman homologue of a human 15986, 2188, 20743, 9148, 9151, 9791, 44252, 14184, 42461, 8204, 7970, 25552, 21657, 26492, 2411, 15088, 1905, 28899, 63380, 33935, 10480, 12686, 25501, 17694, 15701, 53062, 49908, 21612, 38949, 6216, 46863, 9235, 2201, 6985, 9883, 12238, 18057, 21617, 39228, 49928, 54476, 62113, 64316, 12264, 32362, 58198, 2887, 3205, 8557, 9600, 9693, 44867, 53058, 55556, 57658, 2208, 10252, 10302, 14218, 33877, 10317, 10485, 25964, 14815, 1363, 1397, 14827, 21708, 3801, 64698, 2179 or 13249 gene, such as a mouse or rat 15986, 2188, 20743, 9148, 9151, 9791, 44252, 14184, 42461, 8204, 7970, 25552, 21657, 26492, 2411, 15088, 1905, 28899, 63380, 33935, 10480, 12686, 25501, 17694, 15701, 53062, 49908, 21612, 38949, 6216, 46863, 9235, 2201, 6985, 9883, 12238, 18057, 21617, 39228, 49928, 54476, 62113, 64316, 12264, 32362, 58198, 2887, 3205, 8557, 9600, 9693, 44867, 53058, 55556, 57658, 2208, 10252, 10302, 14218, 33877, 10317, 10485, 25964, 14815, 1363, 1397, 14827, 21708, 3801, 64698, 2179 or 13249 gene, can be used as a transgene. Alternatively, a 15986, 2188, 20743, 9148, 9151, 9791, 44252, 14184, 42461, 8204, 7970, 25552, 21657, 26492, 2411, 15088, 1905, 28899, 63380, 33935, 10480, 12686, 25501, 17694, 15701, 53062, 49908, 21612, 38949, 6216, 46863, 9235, 2201, 6985, 9883, 12238, 18057, 21617, 39228, 49928, 54476, 62113, 64316, 12264, 32362, 58198, 2887, 3205, 8557, 9600, 9693, 44867, 53058, 55556, 57658, 2208, 10252, 10302, 14218, 33877, 10317, 10485, 25964, 14815, 1363, 1397, 14827, 21708, 3801, 64698, 2179 or 13249 gene homologue, such as another 15986, 2188, 20743, 9148, 9151, 9791, 44252, 14184, 42461, 8204, 7970, 25552, 21657, 26492, 2411, 15088, 1905, 28899, 63380, 33935, 10480, 12686, 25501, 17694, 15701, 53062, 49908, 21612, 38949, 6216, 46863, 9235, 2201, 6985, 9883, 12238, 18057, 21617, 39228, 49928, 54476, 62113, 64316, 12264, 32362, 58198, 2887, 3205, 8557, 9600, 9693, 44867, 53058, 55556, 57658, 2208, 10252, 10302, 14218, 33877, 10317, 10485, 25964, 14815, 1363, 1397, 14827, 21708, 3801, 64698, 2179 or 13249 family member, can be isolated based on hybridization to the 15986, 2188, 20743, 9148, 9151, 9791, 44252, 14184, 42461, 8204, 7970, 25552, 21657, 26492, 2411, 15088, 1905, 28899, 63380, 33935, 10480, 12686, 25501, 17694, 15701, 53062, 49908, 21612, 38949, 6216, 46863, 9235, 2201, 6985, 9883, 12238, 18057, 21617, 39228, 49928, 54476, 62113, 64316, 12264, 32362, 58198, 2887, 3205, 8557, 9600, 9693, 44867, 53058, 55556, 57658, 2208, 10252, 10302, 14218, 33877, 10317, 10485, 25964, 14815, 1363, 1397, 14827, 21708, 3801, 64698, 2179 or 13249 cDNA sequences and used as a transgene. Intronic sequences and polyadenylation signals can also be included in the transgene to increase the efficiency of expression of the transgene. A tissue-specific regulatory sequence(s) can be operably linked to a 15986, 2188, 20743, 9148, 9151, 9791, 44252, 14184, 42461, 8204, 7970, 25552, 21657, 26492, 2411, 15088, 1905, 28899, 63380, 33935, 10480, 12686, 25501, 17694, 15701, 53062, 49908, 21612, 38949, 6216, 46863, 9235, 2201, 6985, 9883, 12238, 18057, 21617, 39228, 49928, 54476, 62113, 64316, 12264, 32362, 58198, 2887, 3205, 8557, 9600, 9693, 44867, 53058, 55556, 57658, 2208, 10252, 10302, 14218, 33877, 10317, 10485, 25964, 14815, 1363, 1397, 14827, 21708, 3801, 64698, 2179 or 13249 transgene to direct expression of a 15986, 2188, 20743, 9148, 9151, 9791, 44252, 14184, 42461, 8204, 7970, 25552, 21657, 26492, 2411, 15088, 1905, 28899, 63380, 33935, 10480, 12686, 25501, 17694, 15701, 53062, 49908, 21612, 38949, 6216, 46863, 9235, 2201, 6985, 9883, 12238, 18057, 21617, 39228, 49928, 54476, 62113, 64316, 12264, 32362, 58198, 2887, 3205, 8557, 9600, 9693, 44867, 53058, 55556, 57658, 2208, 10252, 10302, 14218, 33877, 10317, 10485, 25964, 14815, 1363, 1397, 14827, 21708, 3801, 64698, 2179 or 13249 protein to particular cells. Methods for generating transgenic animals via embryo manipulation and microinjection, particularly animals such as mice, have become conventional in the art and are described, for example, in U.S. Pat. Nos. 4,736,866 and 4, 870, 009, both by Leder et al., U.S. Pat. No. 4,873,191 by Wagner et al. and in Hogan, B., Manipulating the Mouse Embryo, (Cold Spring Harbor Laboratory Press, Cold Spring Harbor, N.Y., 1986). Similar methods are used for production of other transgenic animals. A transgenic founder animal can be identified based upon the presence of a 15986, 2188, 20743, 9148, 9151, 9791, 44252, 14184, 42461, 8204, 7970, 25552, 21657, 26492, 2411, 15088, 1905, 28899, 63380, 33935, 10480, 12686, 25501, 17694, 15701, 53062, 49908, 21612, 38949, 6216, 46863, 9235, 2201, 6985, 9883, 12238, 18057, 21617, 39228, 49928, 54476, 62113, 64316, 12264, 32362, 58198, 2887, 3205, 8557, 9600, 9693, 44867, 53058, 55556, 57658, 2208, 10252, 10302, 14218, 33877, 10317, 10485, 25964, 14815, 1363, 1397, 14827, 21708, 3801, 64698, 2179 or 13249 transgene in its genome and/or expression of 15986, 2188, 20743, 9148, 9151, 9791, 44252, 14184, 42461, 8204, 7970, 25552, 21657, 26492, 2411, 15088, 1905, 28899, 63380, 33935, 10480, 12686, 25501, 17694, 15701, 53062, 49908, 21612, 38949, 6216, 46863, 9235, 2201, 6985, 9883, 12238, 18057, 21617, 39228, 49928, 54476, 62113, 64316, 12264, 32362, 58198, 2887, 3205, 8557, 9600, 9693, 44867, 53058, 55556, 57658, 2208, 10252, 10302, 14218, 33877, 10317, 10485, 25964, 14815, 1363, 1397, 14827, 21708, 3801, 64698, 2179 or 13249 mRNA in tissues or cells of the animals. A transgenic founder animal can then be used to breed additional animals carrying the transgene. Moreover, transgenic animals carrying a transgene encoding a 15986, 2188, 20743, 9148, 9151, 9791, 44252, 14184, 42461, 8204, 7970, 25552, 21657, 26492, 2411, 15088, 1905, 28899, 63380, 33935, 10480, 12686, 25501, 17694, 15701, 53062, 49908, 21612, 38949, 6216, 46863, 9235, 2201, 6985, 9883, 12238, 18057, 21617, 39228, 49928, 54476, 62113, 64316, 12264, 32362, 58198, 2887, 3205, 8557, 9600, 9693, 44867, 53058, 55556, 57658, 2208, 10252, 10302, 14218, 33877, 10317, 10485, 25964, 14815, 1363, 1397, 14827, 21708, 3801, 64698, 2179 or 13249 protein can further be bred to other transgenic animals carrying other transgenes.

[0885] To create a homologous recombinant animal, a vector is prepared which contains at least a portion of a 15986, 2188, 20743, 9148, 9151, 9791, 44252, 14184, 42461, 8204, 7970, 25552, 21657, 26492, 2411, 15088, 1905, 28899, 63380, 33935, 10480, 12686, 25501, 17694, 15701, 53062, 49908, 21612, 38949, 6216, 46863, 9235, 2201, 6985, 9883, 12238, 18057, 21617, 39228, 49928, 54476, 62113, 64316, 12264, 32362, 58198, 2887, 3205, 8557, 9600, 9693, 44867, 53058, 55556, 57658, 2208, 10252, 10302, 14218, 33877, 10317, 10485, 25964, 14815, 1363, 1397, 14827, 21708, 3801, 64698, 2179 or 13249 gene into which a deletion, addition or substitution has been introduced to thereby alter, e.g., functionally disrupt, the 15986, 2188, 20743, 9148, 9151, 9791, 44252, 14184, 42461, 8204, 7970, 25552, 21657, 26492, 2411, 15088, 1905, 28899, 63380, 33935, 10480, 12686, 25501, 17694, 15701, 53062, 49908, 21612, 38949, 6216, 46863, 9235, 2201, 6985, 9883, 12238, 18057, 21617, 39228, 49928, 54476, 62113, 64316, 12264, 32362, 58198, 2887, 3205, 8557, 9600, 9693, 44867, 53058, 55556, 57658, 2208, 10252, 10302, 14218, 33877, 10317, 10485, 25964, 14815, 1363, 1397, 14827, 21708, 3801, 64698, 2179 or 13249 gene. The 15986, 2188, 20743, 9148, 9151, 9791, 44252, 14184, 42461, 8204, 7970, 25552, 21657, 26492, 2411, 15088, 1905, 28899, 63380, 33935, 10480, 12686, 25501, 17694, 15701, 53062, 49908, 21612, 38949, 6216, 46863, 9235, 2201, 6985, 9883, 12238, 18057, 21617, 39228, 49928, 54476, 62113, 64316, 12264, 32362, 58198, 2887, 3205, 8557, 9600, 9693, 44867, 53058, 55556, 57658, 2208, 10252, 10302, 14218, 33877, 10317, 10485, 25964, 14815, 1363, 1397, 14827, 21708, 3801, 64698, 2179 or 13249 gene can be a human gene but more preferably, is a non-human homologue of a human 15986, 2188, 20743, 9148, 9151, 9791, 44252, 14184, 42461, 8204, 7970, 25552, 21657, 26492, 2411, 15088, 1905, 28899, 63380, 33935, 10480, 12686, 25501, 17694, 15701, 53062, 49908, 21612, 38949, 6216, 46863, 9235, 2201, 6985, 9883, 12238, 18057, 21617, 39228, 49928, 54476, 62113, 64316, 12264, 32362, 58198, 2887, 3205, 8557, 9600, 9693, 44867, 53058, 55556, 57658, 2208, 10252, 10302, 14218, 33877, 10317, 10485, 25964, 14815, 1363, 1397, 14827, 21708, 3801, 64698, 2179 or 13249 gene. For example, a rat 15986, 2188, 20743, 9148, 9151, 9791, 44252, 14184, 42461, 8204, 7970, 25552, 21657, 26492, 2411, 15088, 1905, 28899, 63380, 33935, 10480, 12686, 25501, 17694, 15701, 53062, 49908, 21612, 38949, 6216, 46863, 9235, 2201, 6985, 9883, 12238, 18057, 21617, 39228, 49928, 54476, 62113, 64316, 12264, 32362, 58198, 2887, 3205, 8557, 9600, 9693, 44867, 53058, 55556, 57658, 2208, 10252, 10302, 14218, 33877, 10317, 10485, 25964, 14815, 1363, 1397, 14827, 21708, 3801, 64698, 2179 or 13249 gene can be used to construct a homologous recombination nucleic acid molecule, e.g., a vector, suitable for altering an endogenous 15986, 2188, 20743, 9148, 9151, 9791, 44252, 14184, 42461, 8204, 7970, 25552, 21657, 26492, 2411, 15088, 1905, 28899, 63380, 33935, 10480, 12686, 25501, 17694, 15701, 53062, 49908, 21612, 38949, 6216, 46863, 9235, 2201, 6985, 9883, 12238, 18057, 21617, 39228, 49928, 54476, 62113, 64316, 12264, 32362, 58198, 2887, 3205, 8557, 9600, 9693, 44867, 53058, 55556, 57658, 2208, 10252, 10302, 14218, 33877, 10317, 10485, 25964, 14815, 1363, 1397, 14827, 21708, 3801, 64698, 2179 or 13249 gene in the mouse genome. In a preferred embodiment, the homologous recombination nucleic acid molecule is designed such that, upon homologous recombination, the endogenous 15986, 2188, 20743, 9148, 9151, 9791, 44252, 14184, 42461, 8204, 7970, 25552, 21657, 26492, 2411, 15088, 1905, 28899, 63380, 33935, 10480, 12686, 25501, 17694, 15701, 53062, 49908, 21612, 38949, 6216, 46863, 9235, 2201, 6985, 9883, 12238, 18057, 21617, 39228, 49928, 54476, 62113, 64316, 12264, 32362, 58198, 2887, 3205, 8557, 9600, 9693, 44867, 53058, 55556, 57658, 2208, 10252, 10302, 14218, 33877, 10317, 10485, 25964, 14815, 1363, 1397, 14827, 21708, 3801, 64698, 2179 or 13249 gene is functionally disrupted (i.e., no longer encodes a functional protein; also referred to as a “knock out” vector). Alternatively, the homologous recombination nucleic acid molecule can be designed such that, upon homologous recombination, the endogenous 15986, 2188, 20743, 9148, 9151, 9791, 44252, 14184, 42461, 8204, 7970, 25552, 21657, 26492, 2411, 15088, 1905, 28899, 63380, 33935, 10480, 12686, 25501, 17694, 15701, 53062, 49908, 21612, 38949, 6216, 46863, 9235, 2201, 6985, 9883, 12238, 18057, 21617, 39228, 49928, 54476, 62113, 64316, 12264, 32362, 58198, 2887, 3205, 8557, 9600, 9693, 44867, 53058, 55556, 57658, 2208, 10252, 10302, 14218, 33877, 10317, 10485, 25964, 14815, 1363, 1397, 14827, 21708, 3801, 64698, 2179 or 13249 gene is mutated or otherwise altered but still encodes functional protein (e.g., the upstream regulatory region can be altered to thereby alter the expression of the endogenous 15986, 2188, 20743, 9148, 9151, 9791, 44252, 14184, 42461, 8204, 7970, 25552, 21657, 26492, 2411, 15088, 1905, 28899, 63380, 33935, 10480, 12686, 25501, 17694, 15701, 53062, 49908, 21612, 38949, 6216, 46863, 9235, 2201, 6985, 9883, 12238, 18057, 21617, 39228, 49928, 54476, 62113, 64316, 12264, 32362, 58198, 2887, 3205, 8557, 9600, 9693, 44867, 53058, 55556, 57658, 2208, 10252, 10302, 14218, 33877, 10317, 10485, 25964, 14815, 1363, 1397, 14827, 21708, 3801, 64698, 2179 or 13249 protein). In the homologous recombination nucleic acid molecule, the altered portion of the 15986, 2188, 20743, 9148, 9151, 9791, 44252, 14184, 42461, 8204, 7970, 25552, 21657, 26492, 2411, 15088, 1905, 28899, 63380, 33935, 10480, 12686, 25501, 17694, 15701, 53062, 49908, 21612, 38949, 6216, 46863, 9235, 2201, 6985, 9883, 12238, 18057, 21617, 39228, 49928, 54476, 62113, 64316, 12264, 32362, 58198, 2887, 3205, 8557, 9600, 9693, 44867, 53058, 55556, 57658, 2208, 10252, 10302, 14218, 33877, 10317, 10485, 25964, 14815, 1363, 1397, 14827, 21708, 3801, 64698, 2179 or 13249 gene is flanked at its 5′ and 3′ ends by additional nucleic acid sequence of the 15986, 2188, 20743, 9148, 9151, 9791, 44252, 14184, 42461, 8204, 7970, 25552, 21657, 26492, 2411, 15088, 1905, 28899, 63380, 33935, 10480, 12686, 25501, 17694, 15701, 53062, 49908, 21612, 38949, 6216, 46863, 9235, 2201, 6985, 9883, 12238, 18057, 21617, 39228, 49928, 54476, 62113, 64316, 12264, 32362, 58198, 2887, 3205, 8557, 9600, 9693, 44867, 53058, 55556, 57658, 2208, 10252, 10302, 14218, 33877, 10317, 10485, 25964, 14815, 1363, 1397, 14827, 21708, 3801, 64698, 2179 or 13249 gene to allow for homologous recombination to occur between the exogenous 15986, 2188, 20743, 9148, 9151, 9791, 44252, 14184, 42461, 8204, 7970, 25552, 21657, 26492, 2411, 15088, 1905, 28899, 63380, 33935, 10480, 12686, 25501, 17694, 15701, 53062, 49908, 21612, 38949, 6216, 46863, 9235, 2201, 6985, 9883, 12238, 18057, 21617, 39228, 49928, 54476, 62113, 64316, 12264, 32362, 58198, 2887, 3205, 8557, 9600, 9693, 44867, 53058, 55556, 57658, 2208, 10252, 10302, 14218, 33877, 10317, 10485, 25964, 14815, 1363, 1397, 14827, 21708, 3801, 64698, 2179 or 13249 gene carried by the homologous recombination nucleic acid molecule and an endogenous 15986, 2188, 20743, 9148, 9151, 9791, 44252, 14184, 42461, 8204, 7970, 25552, 21657, 26492, 2411, 15088, 1905, 28899, 63380, 33935, 10480, 12686, 25501, 17694, 15701, 53062, 49908, 21612, 38949, 6216, 46863, 9235, 2201, 6985, 9883, 12238, 18057, 21617, 39228, 49928, 54476, 62113, 64316, 12264, 32362, 58198, 2887, 3205, 8557, 9600, 9693, 44867, 53058, 55556, 57658, 2208, 10252, 10302, 14218, 33877, 10317, 10485, 25964, 14815, 1363, 1397, 14827, 21708, 3801, 64698, 2179 or 13249 gene in a cell, e.g., an embryonic stem cell. The additional flanking 15986, 2188; 20743, 9148, 9151, 9791, 44252, 14184, 42461, 8204, 7970, 25552, 21657, 26492, 2411, 15088, 1905, 28899, 63380, 33935, 10480, 12686, 25501, 17694, 15701, 53062, 49908, 21612, 38949, 6216, 46863, 9235, 2201, 6985, 9883, 12238, 18057, 21617, 39228, 49928, 54476, 62113, 64316, 12264, 32362, 58198, 2887, 3205, 8557, 9600, 9693, 44867, 53058, 55556, 57658, 2208, 10252, 10302, 14218, 33877, 10317, 10485, 25964, 14815, 1363, 1397, 14827, 21708, 3801, 64698, 2179 or 13249 nucleic acid sequence is of sufficient length for successful homologous recombination with the endogenous gene. Typically, several kilobases of flanking DNA (both at the 5′ and 3′ ends) are included in the homologous recombination nucleic acid molecule (see, e.g., Thomas, K. R. and Capecchi, M. R. (1987) Cell 51:503 for a description of homologous recombination vectors). The homologous recombination nucleic acid molecule is introduced into a cell, e.g., an embryonic stem cell line (e.g., by electroporation) and cells in which the introduced 15986, 2188, 20743, 9148, 9151, 9791, 44252, 14184, 42461, 8204, 7970, 25552, 21657, 26492, 2411, 15088, 1905, 28899, 63380, 33935, 10480, 12686, 25501, 17694, 15701, 53062, 49908, 21612, 38949, 6216, 46863, 9235, 2201, 6985, 9883, 12238, 18057, 21617, 39228, 49928, 54476, 62113, 64316, 12264, 32362, 58198, 2887, 3205, 8557, 9600, 9693, 44867, 53058, 55556, 57658, 2208, 10252, 10302, 14218, 33877, 10317, 10485, 25964, 14815, 1363, 1397, 14827, 21708, 3801, 64698, 2179 or 13249 gene has homologously recombined with the endogenous 15986, 2188, 20743, 9148, 9151, 9791, 44252, 14184, 42461, 8204, 7970, 25552, 21657, 26492, 2411, 15088, 1905, 28899, 63380, 33935, 10480, 12686, 25501, 17694, 15701, 53062, 49908, 21612, 38949, 6216, 46863, 9235, 2201, 6985, 9883, 12238, 18057, 21617, 39228, 49928, 54476, 62113, 64316, 12264, 32362, 58198, 2887, 3205, 8557, 9600, 9693, 44867, 53058, 55556, 57658, 2208, 10252, 10302, 14218, 33877, 10317, 10485, 25964, 14815, 1363, 1397, 14827, 21708, 3801, 64698, 2179 or 13249 gene are selected (see e.g., Li, E. et al. (1992) Cell 69:915). The selected cells can then injected into a blastocyst of an animal (e.g., a mouse) to form aggregation chimeras (see e.g., Bradley, A. in Teratocarcinomas and Embryonic Stem Cells: A Practical Approach, E. J. Robertson, ed. (IRL, Oxford, 1987) pp. 113-152). A chimeric embryo can then be implanted into a suitable pseudopregnant female foster animal and the embryo brought to term. Progeny harboring the homologously recombined DNA in their germ cells can be used to breed animals in which all cells of the animal contain the homologously recombined DNA by germline transmission of the transgene. Methods for constructing homologous recombination nucleic acid molecules, e.g., vectors, or homologous recombinant animals are described further in Bradley, A. (1991) Current Opinion in Biotechnology 2:823-829 and in PCT International Publication Nos.: WO 90/11354 by Le Mouellec et al.; WO 91/01140 by Smithies et al.; WO 92/0968 by Zijlstra et al.; and WO 93/04169 by Berns et al.

[0886] In another embodiment, transgenic non-human animals for use in the methods of the invention can be produced which contain selected systems which allow for regulated expression of the transgene. One example of such a system is the cre/loxP recombinase system of bacteriophage P1. For a description of the cre/loxP recombinase system, see, e.g., Lakso et al. (1992) Proc. Natl. Acad. Sci. USA 89:6232-6236. Another example of a recombinase system is the FLP recombinase system of Saccharomyces cerevisiae (O'Gorman et al. (1991) Science 251:1351-1355. If a cre/loxP recombinase system is used to regulate expression of the transgene, animals containing transgenes encoding both the Cre recombinase and a selected protein are required. Such animals can be provided through the construction of “double” transgenic animals, e.g., by mating two transgenic animals, one containing a transgene encoding a selected protein and the other containing a transgene encoding a recombinase.

[0887] Clones of the non-human transgenic animals described herein can also be produced according to the methods described in Wilmut, I. et al. (1997) Nature 385:810-813 and PCT International Publication Nos. WO 97/07668 and WO 97/07669. In brief, a cell, e.g., a somatic cell, from the transgenic animal can be isolated and induced to exit the growth cycle and enter Gₒ phase. The quiescent cell can then be fused, e.g., through the use of electrical pulses, to an enucleated oocyte from an animal of the same species from which the quiescent cell is isolated. The reconstructed oocyte is then cultured such that it develops to morula or blastocyte and then transferred to pseudopregnant female foster animal. The offspring borne of this female foster animal will be a clone of the animal from which the cell, e.g., the somatic cell, is isolated.

[0888] The 15986, 2188, 20743, 9148, 9151, 9791, 44252, 14184, 42461, 8204, 7970, 25552, 21657, 26492, 2411, 15088, 1905, 28899, 63380, 33935, 10480, 12686, 25501, 17694, 15701, 53062, 49908, 21612, 38949, 6216, 46863, 9235, 2201, 6985, 9883, 12238, 18057, 21617, 39228, 49928, 54476, 62113, 64316, 12264, 32362, 58198, 2887, 3205, 8557, 9600, 9693, 44867, 53058, 55556, 57658, 2208, 10252, 10302, 14218, 33877, 10317, 10485, 25964, 14815, 1363, 1397, 14827, 21708, 3801, 64698, 2179 or 13249 transgenic animals that express 15986, 2188, 20743, 9148, 9151, 9791, 44252, 14184, 42461, 8204, 7970, 25552, 21657, 26492, 2411, 15088, 1905, 28899, 63380, 33935, 10480, 12686, 25501, 17694, 15701, 53062, 49908, 21612, 38949, 6216, 46863, 9235, 2201, 6985, 9883, 12238, 18057, 21617, 39228, 49928, 54476, 62113, 64316, 12264, 32362, 58198, 2887, 3205, 8557, 9600, 9693, 44867, 53058, 55556, 57658, 2208, 10252, 10302, 14218, 33877, 10317, 10485, 25964, 14815, 1363, 1397, 14827, 21708, 3801, 64698, 2179 or 13249 mRNA or a 15986, 2188, 20743, 9148, 9151, 9791, 44252, 14184, 42461, 8204, 7970, 25552, 21657, 26492, 2411, 15088, 1905, 28899, 63380, 33935, 10480, 12686, 25501, 17694, 15701, 53062, 49908, 21612, 38949, 6216, 46863, 9235, 2201, 6985, 9883, 12238, 18057, 21617, 39228, 49928, 54476, 62113, 64316, 12264, 32362, 58198, 2887, 3205, 8557, 9600, 9693, 44867, 53058, 55556, 57658, 2208, 10252, 10302, 14218, 33877, 10317, 10485, 25964, 14815, 1363, 1397, 14827, 21708, 3801, 64698, 2179 or 13249 peptide (detected immunocytochemically, using antibodies directed against 15986, 2188, 20743, 9148, 9151, 9791, 44252, 14184, 42461, 8204, 7970, 25552, 21657, 26492, 2411, 15088, 1905, 28899, 63380, 33935, 10480, 12686, 25501, 17694, 15701, 53062, 49908, 21612, 38949, 6216, 46863, 9235, 2201, 6985, 9883, 12238, 18057, 21617, 39228, 49928, 54476, 62113, 64316, 12264, 32362, 58198, 2887, 3205, 8557, 9600, 9693, 44867, 53058, 55556, 57658, 2208, 10252, 10302, 14218, 33877, 10317, 10485, 25964, 14815, 1363, 1397, 14827, 21708, 3801, 64698, 2179 or 13249 epitopes) at easily detectable levels should then be further evaluated to identify those animals which display a characteristic cancer.

[0889] Cell-Based Systems

[0890] Cells that contain and express 15986, 2188, 20743, 9148, 9151, 9791, 44252, 14184, 42461, 8204, 7970, 25552, 21657, 26492, 2411, 15088, 1905, 28899, 63380, 33935, 10480, 12686, 25501, 17694, 15701, 53062, 49908, 21612, 38949, 6216, 46863, 9235, 2201, 6985, 9883, 12238, 18057, 21617, 39228, 49928, 54476, 62113, 64316, 12264, 32362, 58198, 2887, 3205, 8557, 9600, 9693, 44867, 53058, 55556, 57658, 2208, 10252, 10302, 14218, 33877, 10317, 10485, 25964, 14815, 1363, 1397, 14827, 21708, 3801, 64698, 2179 or 13249 gene sequences which encode a 15986, 2188, 20743, 9148, 9151, 9791, 44252, 14184, 42461, 8204, 7970, 25552, 21657, 26492, 2411, 15088, 1905, 28899, 63380, 33935, 10480, 12686, 25501, 17694, 15701, 53062, 49908, 21612, 38949, 6216, 46863, 9235, 2201, 6985, 9883, 12238, 18057, 21617, 39228, 49928, 54476, 62113, 64316, 12264, 32362, 58198, 2887, 3205, 8557, 9600, 9693, 44867, 53058, 55556, 57658, 2208, 10252, 10302, 14218, 33877, 10317, 10485, 25964, 14815, 1363, 1397, 14827, 21708, 3801, 64698, 2179 or 13249 protein, and, further, exhibit cellular phenotypes associated with a cancer, may be used to identify compounds that exhibit an effect on a cancer. Such cells may include non-recombinant monocyte cell lines, such as U937 (ATCC# CRL-1593), THP-1 (ATCC#TIB-202), and P388D1 (ATCC# TIB-63); endothelial cells such as human umbilical vein endothelial cells (HUVECs), human microvascular endothelial cells (HMVEC), and bovine aortic endothelial cells (BAECs); as well as generic mammalian cell lines such as HeLa cells and COS cells, e.g., COS-7 (ATCC# CRL-1651), lung, colon, breast, prostate or ovarian cancer cell lines. Further, such cells may include recombinant, transgenic cell lines. For example, the cancer animal models of the invention, discussed above, may be used to generate cell lines, containing one or more cell types involved in cancer, that can be used as cell culture models for this disorder. While primary cultures derived from the cancer model transgenic animals of the invention may be utilized, the generation of continuous cell lines is preferred. For examples of techniques which may be used to derive a continuous cell line from the transgenic animals, see Small et al., (1985) Mol. Cell Biol. 5:642-648.

[0891] Alternatively, cells of a cell type known to be involved in cancer may be transfected with sequences capable of increasing or decreasing the amount of 15986, 2188, 20743, 9148, 9151, 9791, 44252, 14184, 42461, 8204, 7970, 25552, 21657, 26492, 2411, 15088, 1905, 28899, 63380, 33935, 10480, 12686, 25501, 17694, 15701, 53062, 49908, 21612, 38949, 6216, 46863, 9235, 2201, 6985, 9883, 12238, 18057, 21617, 39228, 49928, 54476, 62113, 64316, 12264, 32362, 58198, 2887, 3205, 8557, 9600, 9693, 44867, 53058, 55556, 57658, 2208, 10252, 10302, 14218, 33877, 10317, 10485, 25964, 14815, 1363, 1397, 14827, 21708, 3801, 64698, 2179 or 13249 gene expression within the cell. For example, 15986, 2188, 20743, 9148, 9151, 9791, 44252, 14184, 42461, 8204, 7970, 25552, 21657, 26492, 2411, 15088, 1905, 28899, 63380, 33935, 10480, 12686, 25501, 17694, 15701, 53062, 49908, 21612, 38949, 6216, 46863, 9235, 2201, 6985, 9883, 12238, 18057, 21617, 39228, 49928, 54476, 62113, 64316, 12264, 32362, 58198, 2887, 3205, 8557, 9600, 9693, 44867, 53058, 55556, 57658, 2208, 10252, 10302, 14218, 33877, 10317, 10485, 25964, 14815, 1363, 1397, 14827, 21708, 3801, 64698, 2179 or 13249 gene sequences may be introduced into, and overexpressed in, the genome of the cell of interest, or, if endogenous 15986, 2188, 20743, 9148, 9151, 9791, 44252, 14184, 42461, 8204, 7970, 25552, 21657, 26492, 2411, 15088, 1905, 28899, 63380, 33935, 10480, 12686, 25501, 17694, 15701, 53062, 49908, 21612, 38949, 6216, 46863, 9235, 2201, 6985, 9883, 12238, 18057, 21617, 39228, 49928, 54476, 62113, 64316, 12264, 32362, 58198, 2887, 3205, 8557, 9600, 9693, 44867, 53058, 55556, 57658, 2208, 10252, 10302, 14218, 33877, 10317, 10485, 25964, 14815, 1363, 1397, 14827, 21708, 3801, 64698, 2179 or 13249 gene sequences are present, they may be either overexpressed or, alternatively disrupted in order to underexpress or inactivate 15986, 2188, 20743, 9148, 9151, 9791, 44252, 14184, 42461, 8204, 7970, 25552, 21657, 26492, 2411, 15088, 1905, 28899, 63380, 33935, 10480, 12686, 25501, 17694, 15701, 53062, 49908, 21612, 38949, 6216, 46863, 9235, 2201, 6985, 9883, 12238, 18057, 21617, 39228, 49928, 54476, 62113, 64316, 12264, 32362, 58198, 2887, 3205, 8557, 9600, 9693, 44867, 53058, 55556, 57658, 2208, 10252, 10302, 14218, 33877, 10317, 10485, 25964, 14815, 1363, 1397, 14827, 21708, 3801, 64698, 2179 or 13249 gene expression.

[0892] In order to overexpress a 15986, 2188, 20743, 9148, 9151, 9791, 44252, 14184, 42461, 8204, 7970, 25552, 21657, 26492, 2411, 15088, 1905, 28899, 63380, 33935, 10480, 12686, 25501, 17694, 15701, 53062, 49908, 21612, 38949, 6216, 46863, 9235, 2201, 6985, 9883, 12238, 18057, 21617, 39228, 49928, 54476, 62113, 64316, 12264, 32362, 58198, 2887, 3205, 8557, 9600, 9693, 44867, 53058, 55556, 57658, 2208, 10252, 10302, 14218, 33877, 10317, 10485, 25964, 14815, 1363, 1397, 14827, 21708, 3801, 64698, 2179 or 13249 gene, the coding portion of the 15986, 2188, 20743, 9148, 9151, 9791, 44252, 14184, 42461, 8204, 7970, 25552, 21657, 26492, 2411, 15088, 1905, 28899, 63380, 33935, 10480, 12686, 25501, 17694, 15701, 53062, 49908, 21612, 38949, 6216, 46863, 9235, 2201, 6985, 9883, 12238, 18057, 21617, 39228, 49928, 54476, 62113, 64316, 12264, 32362, 58198, 2887, 3205, 8557, 9600, 9693, 44867, 53058, 55556, 57658, 2208, 10252, 10302, 14218, 33877, 10317, 10485, 25964, 14815, 1363, 1397, 14827, 21708, 3801, 64698, 2179 or 13249 gene may be ligated to a regulatory sequence which is capable of driving gene expression in the cell type of interest, e.g., an endothelial cell. Such regulatory regions will be well known to those of skill in the art, and may be utilized in the absence of undue experimentation. Recombinant methods for expressing target genes are described above.

[0893] For underexpression of an endogenous 15986, 2188, 20743, 9148, 9151, 9791, 44252, 14184, 42461, 8204, 7970, 25552, 21657, 26492, 2411, 15088, 1905, 28899, 63380, 33935, 10480, 12686, 25501, 17694, 15701, 53062, 49908, 21612, 38949, 6216, 46863, 9235, 2201, 6985, 9883, 12238, 18057, 21617, 39228, 49928, 54476, 62113, 64316, 12264, 32362, 58198, 2887, 3205, 8557, 9600, 9693, 44867, 53058, 55556, 57658, 2208, 10252, 10302, 14218, 33877, 10317, 10485, 25964, 14815, 1363, 1397, 14827, 21708, 3801, 64698, 2179 or 13249 gene sequence, such a sequence may be isolated and engineered such that when reintroduced into the genome of the cell type of interest, the endogenous 15986, 2188, 20743, 9148, 9151, 9791, 44252, 14184, 42461, 8204, 7970, 25552, 21657, 26492, 2411, 15088, 1905, 28899, 63380, 33935, 10480, 12686, 25501, 17694, 15701, 53062, 49908, 21612, 38949, 6216, 46863, 9235, 2201, 6985, 9883, 12238, 18057, 21617, 39228, 49928, 54476, 62113, 64316, 12264, 32362, 58198, 2887, 3205, 8557, 9600, 9693, 44867, 53058, 55556, 57658, 2208, 10252, 10302, 14218, 33877, 10317, 10485, 25964, 14815, 1363, 1397, 14827, 21708, 3801, 64698, 2179 or 13249 alleles will be inactivated. Preferably, the engineered 15986, 2188, 20743, 9148, 9151, 9791, 44252, 14184, 42461, 8204, 7970, 25552, 21657, 26492, 2411, 15088, 1905, 28899, 63380, 33935, 10480, 12686, 25501, 17694, 15701, 53062, 49908, 21612, 38949, 6216, 46863, 9235, 2201, 6985, 9883, 12238, 18057, 21617, 39228, 49928, 54476, 62113, 64316, 12264, 32362, 58198, 2887, 3205, 8557, 9600, 9693, 44867, 53058, 55556, 57658, 2208, 10252, 10302, 14218, 33877, 10317, 10485, 25964, 14815, 1363, 1397, 14827, 21708, 3801, 64698, 2179 or 13249 sequence is introduced via gene targeting such that the endogenous 15986, 2188, 20743, 9148, 9151, 9791, 44252, 14184, 42461, 8204, 7970, 25552, 21657, 26492, 2411, 15088, 1905, 28899, 63380, 33935, 10480, 12686, 25501, 17694, 15701, 53062, 49908, 21612, 38949, 6216, 46863, 9235, 2201, 6985, 9883, 12238, 18057, 21617, 39228, 49928, 54476, 62113, 64316, 12264, 32362, 58198, 2887, 3205, 8557, 9600, 9693, 44867, 53058, 55556, 57658, 2208, 10252, 10302, 14218, 33877, 10317, 10485, 25964, 14815, 1363, 1397, 14827, 21708, 3801, 64698, 2179 or 13249 sequence is disrupted upon integration of the engineered 15986, 2188, 20743, 9148, 9151, 9791, 44252, 14184, 42461, 8204, 7970, 25552, 21657, 26492, 2411, 15088, 1905, 28899, 63380, 33935, 10480, 12686, 25501, 17694, 15701, 53062, 49908, 21612, 38949, 6216, 46863, 9235, 2201, 6985, 9883, 12238, 18057, 21617, 39228, 49928, 54476, 62113, 64316, 12264, 32362, 58198, 2887, 3205, 8557, 9600, 9693, 44867, 53058, 55556, 57658, 2208, 10252, 10302, 14218, 33877, 10317, 10485, 25964, 14815, 1363, 1397, 14827, 21708, 3801, 64698, 2179 or 13249 sequence into the cell's genome. Transfection of host cells with 15986, 2188, 20743, 9148, 9151, 9791, 44252, 14184, 42461, 8204, 7970, 25552, 21657, 26492, 2411, 15088, 1905, 28899, 63380, 33935, 10480, 12686, 25501, 17694, 15701, 53062, 49908, 21612, 38949, 6216, 46863, 9235, 2201, 6985, 9883, 12238, 18057, 21617, 39228, 49928, 54476, 62113, 64316, 12264, 32362, 58198, 2887, 3205, 8557, 9600, 9693, 44867, 53058, 55556, 57658, 2208, 10252, 10302, 14218, 33877, 10317, 10485, 25964, 14815, 1363, 1397, 14827, 21708, 3801, 64698, 2179 or 13249 genes is discussed, above.

[0894] Cells treated with compounds or transfected with 15986, 2188, 20743, 9148, 9151, 9791, 44252, 14184, 42461, 8204, 7970, 25552, 21657, 26492, 2411, 15088, 1905, 28899, 63380, 33935, 10480, 12686, 25501, 17694, 15701, 53062, 49908, 21612, 38949, 6216, 46863, 9235, 2201, 6985, 9883, 12238, 18057, 21617, 39228, 49928, 54476, 62113, 64316, 12264, 32362, 58198, 2887, 3205, 8557, 9600, 9693, 44867, 53058, 55556, 57658, 2208, 10252, 10302, 14218, 33877, 10317, 10485, 25964, 14815, 1363, 1397, 14827, 21708, 3801, 64698, 2179 or 13249 genes can be examined for phenotypes associated with cancer.

[0895] Transfection of 15986, 2188, 20743, 9148, 9151, 9791, 44252, 14184, 42461, 8204, 7970, 25552, 21657, 26492, 2411, 15088, 1905, 28899, 63380, 33935, 10480, 12686, 25501, 17694, 15701, 53062, 49908, 21612, 38949, 6216, 46863, 9235, 2201, 6985, 9883, 12238, 18057, 21617, 39228, 49928, 54476, 62113, 64316, 12264, 32362, 58198, 2887, 3205, 8557, 9600, 9693, 44867, 53058, 55556, 57658, 2208, 10252, 10302, 14218, 33877, 10317, 10485, 25964, 14815, 1363, 1397, 14827, 21708, 3801, 64698, 2179 or 13249 nucleic acid may be accomplished by using standard techniques (described in, for example, Ausubel (1989) supra). Transfected cells should be evaluated for the presence of the recombinant 15986, 2188, 20743, 9148, 9151, 9791, 44252, 14184, 42461, 8204, 7970, 25552, 21657, 26492, 2411, 15088, 1905, 28899, 63380, 33935, 10480, 12686, 25501, 17694, 15701, 53062, 49908, 21612, 38949, 6216, 46863, 9235, 2201, 6985, 9883, 12238, 18057, 21617, 39228, 49928, 54476, 62113, 64316, 12264, 32362, 58198, 2887, 3205, 8557, 9600, 9693, 44867, 53058, 55556, 57658, 2208, 10252, 10302, 14218, 33877, 10317, 10485, 25964, 14815, 1363, 1397, 14827, 21708, 3801, 64698, 2179 or 13249 gene sequences, for expression and accumulation of 15986, 2188, 20743, 9148, 9151, 9791, 44252, 14184, 42461, 8204, 7970, 25552, 21657, 26492, 2411, 15088, 1905, 28899, 63380, 33935, 10480, 12686, 25501, 17694, 15701, 53062, 49908, 21612, 38949, 6216, 46863, 9235, 2201, 6985, 9883, 12238, 18057, 21617, 39228, 49928, 54476, 62113, 64316, 12264, 32362, 58198, 2887, 3205, 8557, 9600, 9693, 44867, 53058, 55556, 57658, 2208, 10252, 10302, 14218, 33877, 10317, 10485, 25964, 14815, 1363, 1397, 14827, 21708, 3801, 64698, 2179 or 13249 mRNA, and for the presence of recombinant 15986, 2188, 20743, 9148, 9151, 9791, 44252, 14184, 42461, 8204, 7970, 25552, 21657, 26492, 2411, 15088, 1905, 28899, 63380, 33935, 10480, 12686, 25501, 17694, 15701, 53062, 49908, 21612, 38949, 6216, 46863, 9235, 2201, 6985, 9883, 12238, 18057, 21617, 39228, 49928, 54476, 62113, 64316, 12264, 32362, 58198, 2887, 3205, 8557, 9600, 9693, 44867, 53058, 55556, 57658, 2208, 10252, 10302, 14218, 33877, 10317, 10485, 25964, 14815, 1363, 1397, 14827, 21708, 3801, 64698, 2179 or 13249 protein production. In instances wherein a decrease in 15986, 2188, 20743, 9148, 9151, 9791, 44252, 14184, 42461, 8204, 7970, 25552, 21657, 26492, 2411, 15088, 1905, 28899, 63380, 33935, 10480, 12686, 25501, 17694, 15701, 53062, 49908, 21612, 38949, 6216, 46863, 9235, 2201, 6985, 9883, 12238, 18057, 21617, 39228, 49928, 54476, 62113, 64316, 12264, 32362, 58198, 2887, 3205, 8557, 9600, 9693, 44867, 53058, 55556, 57658, 2208, 10252, 10302, 14218, 33877, 10317, 10485, 25964, 14815, 1363, 1397, 14827, 21708, 3801, 64698, 2179 or 13249 gene expression is desired, standard techniques may be used to demonstrate whether a decrease in endogenous 15986, 2188, 20743, 9148, 9151, 9791, 44252, 14184, 42461, 8204, 7970, 25552, 21657, 26492, 2411, 15088, 1905, 28899, 63380, 33935, 10480, 12686, 25501, 17694, 15701, 53062, 49908, 21612, 38949, 6216, 46863, 9235, 2201, 6985, 9883, 12238, 18057, 21617, 39228, 49928, 54476, 62113, 64316, 12264, 32362, 58198, 2887, 3205, 8557, 9600, 9693, 44867, 53058, 55556, 57658, 2208, 10252, 10302, 14218, 33877, 10317, 10485, 25964, 14815, 1363, 1397, 14827, 21708, 3801, 64698, 2179 or 13249 gene expression and/or in 15986, 2188, 20743, 9148, 9151, 9791, 44252, 14184, 42461, 8204, 7970, 25552, 21657, 26492, 2411, 15088, 1905, 28899, 63380, 33935, 10480, 12686, 25501, 17694, 15701, 53062, 49908, 21612, 38949, 6216, 46863, 9235, 2201, 6985, 9883, 12238, 18057, 21617, 39228, 49928, 54476, 62113, 64316, 12264, 32362, 58198, 2887, 3205, 8557, 9600, 9693, 44867, 53058, 55556, 57658, 2208, 10252, 10302, 14218, 33877, 10317, 10485, 25964, 14815, 1363, 1397, 14827, 21708, 3801, 64698, 2179 or 13249 protein production is achieved.

[0896] Cellular models for the study of angiogenesis include models of endothelial cell differentiation on Matrigel (Baatout, S. et al. (1996) Rom. J. Intern. Med. 34:263-269; Benelli, R et al. (1999) Int. J. Biol. Markers 14:243-246), embryonic stem cell models of vascular morphogenesis (Doetschman, T. et al. (1993) Hypertension 22:618-629), the culture of microvessel fragments in physiological gels (Hoying, J B et al. (1996) In Vitro Cell Dev. Biol. Anim. 32: 409-419; U.S. Pat. No. 5,976,782), and the treatment of endothelial cells and smooth muscle cells with atherogenic and angiogenic factors including growth factors and cytokines (e.g., IL-1β, PDGF, TNFα, VEGF), homocysteine, and LDL. In vitro angiogenesis models are described in, for example, Black, A F et al. (1999) Cell Biol. Toxicol. 15:81-90.

[0897] Cellular models for the study of tumorigenesis are known in the art, and include cell lines derived from clinical tumors, cells exposed to chemotherapeutic agents, cells exposed to carcinogenic agents, and cell lines with genetic alterations in growth regulatory genes, for example, oncogenes (e.g., ras) and tumor suppressor genes (e.g., p53).

[0898] Also provided are cells or a purified preparation thereof, e.g., human cells, in which an endogenous 15986, 2188, 20743, 9148, 9151, 9791, 44252, 14184, 42461, 8204, 7970, 25552, 21657, 26492, 2411, 15088, 1905, 28899, 63380, 33935, 10480, 12686, 25501, 17694, 15701, 53062, 49908, 21612, 38949, 6216, 46863, 9235, 2201, 6985, 9883, 12238, 18057, 21617, 39228, 49928, 54476, 62113, 64316, 12264, 32362, 58198, 2887, 3205, 8557, 9600, 9693, 44867, 53058, 55556, 57658, 2208, 10252, 10302, 14218, 33877, 10317, 10485, 25964, 14815, 1363, 1397, 14827, 21708, 3801, 64698, 2179 or 13249 is under the control of a regulatory sequence that does not normally control the expression of the endogenous 15986, 2188, 20743, 9148, 9151, 9791, 44252, 14184, 42461, 8204, 7970, 25552, 21657, 26492, 2411, 15088, 1905, 28899, 63380, 33935, 10480, 12686, 25501, 17694, 15701, 53062, 49908, 21612, 38949, 6216, 46863, 9235, 2201, 6985, 9883, 12238, 18057, 21617, 39228, 49928, 54476, 62113, 64316, 12264, 32362, 58198, 2887, 3205, 8557, 9600, 9693, 44867, 53058, 55556, 57658, 2208, 10252, 10302, 14218, 33877, 10317, 10485, 25964, 14815, 1363, 1397, 14827, 21708, 3801, 64698, 2179 or 13249 gene. The expression characteristics of an endogenous gene within a cell, e.g., a cell line or microorganism, can be modified by inserting a heterologous DNA regulatory element into the genome of the cell such that the inserted regulatory element is operably linked to the endogenous 15986, 2188, 20743, 9148, 9151, 9791, 44252, 14184, 42461, 8204, 7970, 25552, 21657, 26492, 2411, 15088, 1905, 28899, 63380, 33935, 10480, 12686, 25501, 17694, 15701, 53062, 49908, 21612, 38949, 6216, 46863, 9235, 2201, 6985, 9883, 12238, 18057, 21617, 39228, 49928, 54476, 62113, 64316, 12264, 32362, 58198, 2887, 3205, 8557, 9600, 9693, 44867, 53058, 55556, 57658, 2208, 10252, 10302, 14218, 33877, 10317, 10485, 25964, 14815, 1363, 1397, 14827, 21708, 3801, 64698, 2179 or 13249 gene. For example, an endogenous 15986, 2188, 20743, 9148, 9151, 9791, 44252, 14184, 42461, 8204, 7970, 25552, 21657, 26492, 2411, 15088, 1905, 28899, 63380, 33935, 10480, 12686, 25501, 17694, 15701, 53062, 49908, 21612, 38949, 6216, 46863, 9235, 2201, 6985, 9883, 12238, 18057, 21617, 39228, 49928, 54476, 62113, 64316, 12264, 32362, 58198, 2887, 3205, 8557, 9600, 9693, 44867, 53058, 55556, 57658, 2208, 10252, 10302, 14218, 33877, 10317, 10485, 25964, 14815, 1363, 1397, 14827, 21708, 3801, 64698, 2179 or 13249 gene, e.g., a gene which is “transcriptionally silent,” e.g., not normally expressed, or expressed only at very low levels, may be activated by inserting a regulatory element which is capable of promoting the expression of a normally expressed gene product in that cell. Techniques such as targeted homologous recombinations, can be used to insert the heterologous DNA as described in, e.g., Chappel, U.S. Pat. No. 5,272,071; WO 91/06667, published on May 16, 1991.

[0899] Predictive Medicine:

[0900] The present invention also pertains to the field of predictive medicine in which diagnostic assays, prognostic assays, and monitoring clinical trials are used for prognostic (predictive) purposes to thereby treat an individual prophylactically. Accordingly, one aspect of the present invention relates to diagnostic assays for determining 15986, 2188, 20743, 9148, 9151, 9791, 44252, 14184, 42461, 8204, 7970, 25552, 21657, 26492, 2411, 15088, 1905, 28899, 63380, 33935, 10480, 12686, 25501, 17694, 15701, 53062, 49908, 21612, 38949, 6216, 46863, 9235, 2201, 6985, 9883, 12238, 18057, 21617, 39228, 49928, 54476, 62113, 64316, 12264, 32362, 58198, 2887, 3205, 8557, 9600, 9693, 44867, 53058, 55556, 57658, 2208, 10252, 10302, 14218, 33877, 10317, 10485, 25964, 14815, 1363, 1397, 14827, 21708, 3801, 64698, 2179 or 13249 protein and/or nucleic acid expression as well as 15986, 2188, 20743, 9148, 9151, 9791, 44252, 14184, 42461, 8204, 7970, 25552, 21657, 26492, 2411, 15088, 1905, 28899, 63380, 33935, 10480, 12686, 25501, 17694, 15701, 53062, 49908, 21612, 38949, 6216, 46863, 9235, 2201, 6985, 9883, 12238, 18057, 21617, 39228, 49928, 54476, 62113, 64316, 12264, 32362, 58198, 2887, 3205, 8557, 9600, 9693, 44867, 53058, 55556, 57658, 2208, 10252, 10302, 14218, 33877, 10317, 10485, 25964, 14815, 1363, 1397, 14827, 21708, 3801, 64698, 2179 or 13249 activity, in the context of a biological sample (e.g., blood, serum, cells, e.g., endothelial cells, or tissue, e.g., vascular tissue, bladder tissue or prostate tissue) to thereby determine whether an individual is afflicted with a predisposition or is experiencing a cancer. The invention also provides for prognostic (or predictive) assays for determining whether an individual is at risk of developing a cancer. For example, mutations in a 15986, 2188, 20743, 9148, 9151, 9791, 44252, 14184, 42461, 8204, 7970, 25552, 21657, 26492, 2411, 15088, 1905, 28899, 63380, 33935, 10480, 12686, 25501, 17694, 15701, 53062, 49908, 21612, 38949, 6216, 46863, 9235, 2201, 6985, 9883, 12238, 18057, 21617, 39228, 49928, 54476, 62113, 64316, 12264, 32362, 58198, 2887, 3205, 8557, 9600, 9693, 44867, 53058, 55556, 57658, 2208, 10252, 10302, 14218, 33877, 10317, 10485, 25964, 14815, 1363, 1397, 14827, 21708, 3801, 64698, 2179 or 13249 gene can be assayed for in a biological sample. Such assays can be used for prognostic or predictive purpose to thereby phophylactically treat an individual prior to the onset of a cancer.

[0901] Another aspect of the invention pertains to monitoring the influence of 15986, 2188, 20743, 9148, 9151, 9791, 44252, 14184, 42461, 8204, 7970, 25552, 21657, 26492, 2411, 15088, 1905, 28899, 63380, 33935, 10480, 12686, 25501, 17694, 15701, 53062, 49908, 21612, 38949, 6216, 46863, 9235, 2201, 6985, 9883, 12238, 18057, 21617, 39228, 49928, 54476, 62113, 64316, 12264, 32362, 58198, 2887, 3205, 8557, 9600, 9693, 44867, 53058, 55556, 57658, 2208, 10252, 10302, 14218, 33877, 10317, 10485, 25964, 14815, 1363, 1397, 14827, 21708, 3801, 64698, 2179 or 13249 modulators (e.g., anti-15986, 2188, 20743, 9148, 9151, 9791, 44252, 14184, 42461, 8204, 7970, 25552, 21657, 26492, 2411, 15088, 1905, 28899, 63380, 33935, 10480, 12686, 25501, 17694, 15701, 53062, 49908, 21612, 38949, 6216, 46863, 9235, 2201, 6985, 9883, 12238, 18057, 21617, 39228, 49928, 54476, 62113, 64316, 12264, 32362, 58198, 2887, 3205, 8557, 9600, 9693, 44867, 53058, 55556, 57658, 2208, 10252, 10302, 14218, 33877, 10317, 10485, 25964, 14815, 1363, 1397, 14827, 21708, 3801, 64698, 2179 or 13249 antibodies or 15986, 2188, 20743, 9148, 9151, 9791, 44252, 14184, 42461, 8204, 7970, 25552, 21657, 26492, 2411, 15088, 1905, 28899, 63380, 33935, 10480, 12686, 25501, 17694, 15701, 53062, 49908, 21612, 38949, 6216, 46863, 9235, 2201, 6985, 9883, 12238, 18057, 21617, 39228, 49928, 54476, 62113, 64316, 12264, 32362, 58198, 2887, 3205, 8557, 9600, 9693, 44867, 53058, 55556, 57658, 2208, 10252, 10302, 14218, 33877, 10317, 10485, 25964, 14815, 1363, 1397, 14827, 21708, 3801, 64698, 2179 or 13249 ribozymes) on the expression or activity of 15986, 2188, 20743, 9148, 9151, 9791, 44252, 14184, 42461, 8204, 7970, 25552, 21657, 26492, 2411, 15088, 1905, 28899, 63380, 33935, 10480, 12686, 25501, 17694, 15701, 53062, 49908, 21612, 38949, 6216, 46863, 9235, 2201, 6985, 9883, 12238, 18057, 21617, 39228, 49928, 54476, 62113, 64316, 12264, 32362, 58198, 2887, 3205, 8557, 9600, 9693, 44867, 53058, 55556, 57658, 2208, 10252, 10302, 14218, 33877, 10317, 10485, 25964, 14815, 1363, 1397, 14827, 21708, 3801, 64698, 2179 or 13249 in clinical trials.

[0902] These and other agents are described in further detail in the following sections.

[0903] Diagnostic Assays

[0904] To determine whether a subject is afflicted with a disease, a biological sample may be obtained from a subject and the biological sample may be contacted with a compound or an agent capable of detecting a 15986, 2188, 20743, 9148, 9151, 9791, 44252, 14184, 42461, 8204, 7970, 25552, 21657, 26492, 2411, 15088, 1905, 28899, 63380, 33935, 10480, 12686, 25501, 17694, 15701, 53062, 49908, 21612, 38949, 6216, 46863, 9235, 2201, 6985, 9883, 12238, 18057, 21617, 39228, 49928, 54476, 62113, 64316, 12264, 32362, 58198, 2887, 3205, 8557, 9600, 9693, 44867, 53058, 55556, 57658, 2208, 10252, 10302, 14218, 33877, 10317, 10485, 25964, 14815, 1363, 1397, 14827, 21708, 3801, 64698, 2179 or 13249 protein or nucleic acid (e.g., mRNA or genomic DNA) that encodes a 15986, 2188, 20743, 9148, 9151, 9791, 44252, 14184, 42461, 8204, 7970, 25552, 21657, 26492, 2411, 15088, 1905, 28899, 63380, 33935, 10480, 12686, 25501, 17694, 15701, 53062, 49908, 21612, 38949, 6216, 46863, 9235, 2201, 6985, 9883, 12238, 18057, 21617, 39228, 49928, 54476, 62113, 64316, 12264, 32362, 58198, 2887, 3205, 8557, 9600, 9693, 44867, 53058, 55556, 57658, 2208, 10252, 10302, 14218, 33877, 10317, 10485, 25964, 14815, 1363, 1397, 14827, 21708, 3801, 64698, 2179 or 13249 protein, in the biological sample. A preferred agent for detecting 15986, 2188, 20743, 9148, 9151, 9791, 44252, 14184, 42461, 8204, 7970, 25552, 21657, 26492, 2411, 15088, 1905, 28899, 63380, 33935, 10480, 12686, 25501, 17694, 15701, 53062, 49908, 21612, 38949, 6216, 46863, 9235, 2201, 6985, 9883, 12238, 18057, 21617, 39228, 49928, 54476, 62113, 64316, 12264, 32362, 58198, 2887, 3205, 8557, 9600, 9693, 44867, 53058, 55556, 57658, 2208, 10252, 10302, 14218, 33877, 10317, 10485, 25964, 14815, 1363, 1397, 14827, 21708, 3801, 64698, 2179 or 13249 mRNA or genomic DNA is a labeled nucleic acid probe capable of hybridizing to 15986, 2188, 20743, 9148, 9151, 9791, 44252, 14184, 42461, 8204, 7970, 25552, 21657, 26492, 2411, 15088, 1905, 28899, 63380, 33935, 10480, 12686, 25501, 17694, 15701, 53062, 49908, 21612, 38949, 6216, 46863, 9235, 2201, 6985, 9883, 12238, 18057, 21617, 39228, 49928, 54476, 62113, 64316, 12264, 32362, 58198, 2887, 3205, 8557, 9600, 9693, 44867, 53058, 55556, 57658, 2208, 10252, 10302, 14218, 33877, 10317, 10485, 25964, 14815, 1363, 1397, 14827, 21708, 3801, 64698, 2179 or 13249 mRNA or genomic DNA. The nucleic acid probe can be, for example, the 15986, 2188, 20743, 9148, 9151, 9791, 44252, 14184, 42461, 8204, 7970, 25552, 21657, 26492, 2411, 15088, 1905, 28899, 63380, 33935, 10480, 12686, 25501, 17694, 15701, 53062, 49908, 21612, 38949, 6216, 46863, 9235, 2201, 6985, 9883, 12238, 18057, 21617, 39228, 49928, 54476, 62113, 64316, 12264, 32362, 58198, 2887, 3205, 8557, 9600, 9693, 44867, 53058, 55556, 57658, 2208, 10252, 10302, 14218, 33877, 10317, 10485, 25964, 14815, 1363, 1397, 14827, 21708, 3801, 64698, 2179 or 13249 nucleic acid set forth in SEQ ID NO:1, 3, 5, 7, 9, 11, 13, 15, 17, 19, 21, 23, 25, 27, 29, 31, 33, 35, 37, 39, 41, 43, 45, 47, 49, 51, 53, 55, 57, 59, 61, 63, 65, 67, 69, 71, 73, 75, 77, 79, 81, 83, 85, 87, 89, 91, 93, 95, 97, 99, 101, 103, 105, 107, 109, 111, 113, 115, 117, 119, 121, 123, 125, 127, 129, 131, 133, 135, 137, 139, 141 or 143 or a portion thereof, such as an oligonucleotide of at least 15, 20, 25, 30, 25, 40, 45, 50, 100, 250 or 500 nucleotides in length and sufficient to specifically hybridize under stringent conditions to 15986, 2188, 20743, 9148, 9151, 9791, 44252, 14184, 42461, 8204, 7970, 25552, 21657, 26492, 2411, 15088, 1905, 28899, 63380, 33935, 10480, 12686, 25501, 17694, 15701, 53062, 49908, 21612, 38949, 6216, 46863, 9235, 2201, 6985, 9883, 12238, 18057, 21617, 39228, 49928, 54476, 62113, 64316, 12264, 32362, 58198, 2887, 3205, 8557, 9600, 9693, 44867, 53058, 55556, 57658, 2208, 10252, 10302, 14218, 33877, 10317, 10485, 25964, 14815, 1363, 1397, 14827, 21708, 3801, 64698, 2179 or 13249 mRNA or genomic DNA. Other suitable probes for use in the diagnostic assays of the invention are described herein.

[0905] A preferred agent for detecting 15986, 2188, 20743, 9148, 9151, 9791, 44252, 14184, 42461, 8204, 7970, 25552, 21657, 26492, 2411, 15088, 1905, 28899, 63380, 33935, 10480, 12686, 25501, 17694, 15701, 53062, 49908, 21612, 38949, 6216, 46863, 9235, 2201, 6985, 9883, 12238, 18057, 21617, 39228, 49928, 54476, 62113, 64316, 12264, 32362, 58198, 2887, 3205, 8557, 9600, 9693, 44867, 53058, 55556, 57658, 2208, 10252, 10302, 14218, 33877, 10317, 10485, 25964, 14815, 1363, 1397, 14827, 21708, 3801, 64698, 2179 or 13249 protein in a sample is an antibody capable of binding to 15986, 2188, 20743, 9148, 9151, 9791, 44252, 14184, 42461, 8204, 7970, 25552, 21657, 26492, 2411, 15088, 1905, 28899, 63380, 33935, 10480, 12686, 25501, 17694, 15701, 53062, 49908, 21612, 38949, 6216, 46863, 9235, 2201, 6985, 9883, 12238, 18057, 21617, 39228, 49928, 54476, 62113, 64316, 12264, 32362, 58198, 2887, 3205, 8557, 9600, 9693, 44867, 53058, 55556, 57658, 2208, 10252, 10302, 14218, 33877, 10317, 10485, 25964, 14815, 1363, 1397, 14827, 21708, 3801, 64698, 2179 or 13249 protein, preferably an antibody with a detectable label. Antibodies can be polyclonal, or more preferably, monoclonal. An intact antibody, or a fragment thereof (e.g., Fab or F(ab′)₂) can be used. The term “labeled”, with regard to the probe or antibody, is intended to encompass direct labeling of the probe or antibody by coupling (i.e., physically linking) a detectable substance to the probe or antibody, as well as indirect labeling of the probe or antibody by reactivity with another reagent that is directly labeled. Examples of indirect labeling include detection of a primary antibody using a fluorescently labeled secondary antibody and end-labeling of a DNA probe with biotin such that it can be detected with fluorescently labeled streptavidin.

[0906] The term “biological sample” is intended to include tissues, cells, and biological fluids isolated from a subject, as well as tissues, cells, and fluids present within a subject. That is, the detection method of the invention can be used to detect 15986, 2188, 20743, 9148, 9151, 9791, 44252, 14184, 42461, 8204, 7970, 25552, 21657, 26492, 2411, 15088, 1905, 28899, 63380, 33935, 10480, 12686, 25501, 17694, 15701, 53062, 49908, 21612, 38949, 6216, 46863, 9235, 2201, 6985, 9883, 12238, 18057, 21617, 39228, 49928, 54476, 62113, 64316, 12264, 32362, 58198, 2887, 3205, 8557, 9600, 9693, 44867, 53058, 55556, 57658, 2208, 10252, 10302, 14218, 33877, 10317, 10485, 25964, 14815, 1363, 1397, 14827, 21708, 3801, 64698, 2179 or 13249 mRNA, protein, or genomic DNA in a biological sample in vitro as well as in vivo. For example, in vitro techniques for detection of 15986, 2188, 20743, 9148, 9151, 9791, 44252, 14184, 42461, 8204, 7970, 25552, 21657, 26492, 2411, 15088, 1905, 28899, 63380, 33935, 10480, 12686, 25501, 17694, 15701, 53062, 49908, 21612, 38949, 6216, 46863, 9235, 2201, 6985, 9883, 12238, 18057, 21617, 39228, 49928, 54476, 62113, 64316, 12264, 32362, 58198, 2887, 3205, 8557, 9600, 9693, 44867, 53058, 55556, 57658, 2208, 10252, 10302, 14218, 33877, 10317, 10485, 25964, 14815, 1363, 1397, 14827, 21708, 3801, 64698, 2179 or 13249 mRNA include Northern hybridizations and in situ hybridizations. In vitro techniques for detection of 15986, 2188, 20743, 9148, 9151, 9791, 44252, 14184, 42461, 8204, 7970, 25552, 21657, 26492, 2411, 15088, 1905, 28899, 63380, 33935, 10480, 12686, 25501, 17694, 15701, 53062, 49908, 21612, 38949, 6216, 46863, 9235, 2201, 6985, 9883, 12238, 18057, 21617, 39228, 49928, 54476, 62113, 64316, 12264, 32362, 58198, 2887, 3205, 8557, 9600, 9693, 44867, 53058, 55556, 57658, 2208, 10252, 10302, 14218, 33877, 10317, 10485, 25964, 14815, 1363, 1397, 14827, 21708, 3801, 64698, 2179 or 13249 protein include enzyme linked immunosorbent assays (ELISAs), Western blots, immunoprecipitations and immunofluorescence. In vitro techniques for detection of 15986, 2188, 20743, 9148, 9151, 9791, 44252, 14184, 42461, 8204, 7970, 25552, 21657, 26492, 2411, 15088, 1905, 28899, 63380, 33935, 10480, 12686, 25501, 17694, 15701, 53062, 49908, 21612, 38949, 6216, 46863, 9235, 2201, 6985, 9883, 12238, 18057, 21617, 39228, 49928, 54476, 62113, 64316, 12264, 32362, 58198, 2887, 3205, 8557, 9600, 9693, 44867, 53058, 55556, 57658, 2208, 10252, 10302, 14218, 33877, 10317, 10485, 25964, 14815, 1363, 1397, 14827, 21708, 3801, 64698, 2179 or 13249 genomic DNA include Southern hybridizations. Furthermore, in vivo techniques for detection of 15986, 2188, 20743, 9148, 9151, 9791, 44252, 14184, 42461, 8204, 7970, 25552, 21657, 26492, 2411, 15088, 1905, 28899, 63380, 33935, 10480, 12686, 25501, 17694, 15701, 53062, 49908, 21612, 38949, 6216, 46863, 9235, 2201, 6985, 9883, 12238, 18057, 21617, 39228, 49928, 54476, 62113, 64316, 12264, 32362, 58198, 2887, 3205, 8557, 9600, 9693, 44867, 53058, 55556, 57658, 2208, 10252, 10302, 14218, 33877, 10317, 10485, 25964, 14815, 1363, 1397, 14827, 21708, 3801, 64698, 2179 or 13249 protein include introducing into a subject a labeled anti-15986, 2188, 20743, 9148, 9151, 9791, 44252, 14184, 42461, 8204, 7970, 25552, 21657, 26492, 2411, 15088, 1905, 28899, 63380, 33935, 10480, 12686, 25501, 17694, 15701, 53062, 49908, 21612, 38949, 6216, 46863, 9235, 2201, 6985, 9883, 12238, 18057, 21617, 39228, 49928, 54476, 62113, 64316, 12264, 32362, 58198, 2887, 3205, 8557, 9600, 9693, 44867, 53058, 55556, 57658, 2208, 10252, 10302, 14218, 33877, 10317, 10485, 25964, 14815, 1363, 1397, 14827, 21708, 3801, 64698, 2179 or 13249 antibody. For example, the antibody can be labeled with a radioactive marker whose presence and location in a subject can be detected by standard imaging techniques.

[0907] In another embodiment, the methods further involve obtaining a control biological sample from a control subject, contacting the control sample with a compound or agent capable of detecting 15986, 2188, 20743, 9148, 9151, 9791, 44252, 14184, 42461, 8204, 7970, 25552, 21657, 26492, 2411, 15088, 1905, 28899, 63380, 33935, 10480, 12686, 25501, 17694, 15701, 53062, 49908, 21612, 38949, 6216, 46863, 9235, 2201, 6985, 9883, 12238, 18057, 21617, 39228, 49928, 54476, 62113, 64316, 12264, 32362, 58198, 2887, 3205, 8557, 9600, 9693, 44867, 53058, 55556, 57658, 2208, 10252, 10302, 14218, 33877, 10317, 10485, 25964, 14815, 1363, 1397, 14827, 21708, 3801, 64698, 2179 or 13249 protein, mRNA, or genomic DNA, such that the presence of 15986, 2188, 20743, 9148, 9151, 9791, 44252, 14184, 42461, 8204, 7970, 25552, 21657, 26492, 2411, 15088, 1905, 28899, 63380, 33935, 10480, 12686, 25501, 17694, 15701, 53062, 49908, 21612, 38949, 6216, 46863, 9235, 2201, 6985, 9883, 12238, 18057, 21617, 39228, 49928, 54476, 62113, 64316, 12264, 32362, 58198, 2887, 3205, 8557, 9600, 9693, 44867, 53058, 55556, 57658, 2208, 10252, 10302, 14218, 33877, 10317, 10485, 25964, 14815, 1363, 1397, 14827, 21708, 3801, 64698, 2179 or 13249 protein, mRNA or genomic DNA is detected in the biological sample, and comparing the presence of 15986, 2188, 20743, 9148, 9151, 9791, 44252, 14184, 42461, 8204, 7970, 25552, 21657, 26492, 2411, 15088, 1905, 28899, 63380, 33935, 10480, 12686, 25501, 17694, 15701, 53062, 49908, 21612, 38949, 6216, 46863, 9235, 2201, 6985, 9883, 12238, 18057, 21617, 39228, 49928, 54476, 62113, 64316, 12264, 32362, 58198, 2887, 3205, 8557, 9600, 9693, 44867, 53058, 55556, 57658, 2208, 10252, 10302, 14218, 33877, 10317, 10485, 25964, 14815, 1363, 1397, 14827, 21708, 3801, 64698, 2179 or 13249 protein, mRNA or genomic DNA in the control sample with the presence of 15986, 2188, 20743, 9148, 9151, 9791, 44252, 14184, 42461, 8204, 7970, 25552, 21657, 26492, 2411, 15088, 1905, 28899, 63380, 33935, 10480, 12686, 25501, 17694, 15701, 53062, 49908, 21612, 38949, 6216, 46863, 9235, 2201, 6985, 9883, 12238, 18057, 21617, 39228, 49928, 54476, 62113, 64316, 12264, 32362, 58198, 2887, 3205, 8557, 9600, 9693, 44867, 53058, 55556, 57658, 2208, 10252, 10302, 14218, 33877, 10317, 10485, 25964, 14815, 1363, 1397, 14827, 21708, 3801, 64698, 2179 or 13249 protein, mRNA or genomic DNA in the test sample.

[0908] Prognostic Assays

[0909] The present invention further pertains to methods for identifying subjects having or at risk of developing a disease associated with aberrant 15986, 2188, 20743, 9148, 9151, 9791, 44252, 14184, 42461, 8204, 7970, 25552, 21657, 26492, 2411, 15088, 1905, 28899, 63380, 33935, 10480, 12686, 25501, 17694, 15701, 53062, 49908, 21612, 38949, 6216, 46863, 9235, 2201, 6985, 9883, 12238, 18057, 21617, 39228, 49928, 54476, 62113, 64316, 12264, 32362, 58198, 2887, 3205, 8557, 9600, 9693, 44867, 53058, 55556, 57658, 2208, 10252, 10302, 14218, 33877, 10317, 10485, 25964, 14815, 1363, 1397, 14827, 21708, 3801, 64698, 2179 or 13249 expression or activity.

[0910] As used herein, the term “aberrant” includes a 15986, 2188, 20743, 9148, 9151, 9791, 44252, 14184, 42461, 8204, 7970, 25552, 21657, 26492, 2411, 15088, 1905, 28899, 63380, 33935, 10480, 12686, 25501, 17694, 15701, 53062, 49908, 21612, 38949, 6216, 46863, 9235, 2201, 6985, 9883, 12238, 18057, 21617, 39228, 49928, 54476, 62113, 64316, 12264, 32362, 58198, 2887, 3205, 8557, 9600, 9693, 44867, 53058, 55556, 57658, 2208, 10252, 10302, 14218, 33877, 10317, 10485, 25964, 14815, 1363, 1397, 14827, 21708, 3801, 64698, 2179 or 13249 expression or activity which deviates from the wild type 15986, 2188, 20743, 9148, 9151, 9791, 44252, 14184, 42461, 8204, 7970, 25552, 21657, 26492, 2411, 15088, 1905, 28899, 63380, 33935, 10480, 12686, 25501, 17694, 15701, 53062, 49908, 21612, 38949, 6216, 46863, 9235, 2201, 6985, 9883, 12238, 18057, 21617, 39228, 49928, 54476, 62113, 64316, 12264, 32362, 58198, 2887, 3205, 8557, 9600, 9693, 44867, 53058, 55556, 57658, 2208, 10252, 10302, 14218, 33877, 10317, 10485, 25964, 14815, 1363, 1397, 14827, 21708, 3801, 64698, 2179 or 13249 expression or activity. Aberrant expression or activity includes increased or decreased expression or activity, as well as expression or activity which does not follow the wild type developmental pattern of expression or the subcellular pattern of expression. For example, aberrant 15986, 2188, 20743, 9148, 9151, 9791, 44252, 14184, 42461, 8204, 7970, 25552, 21657, 26492, 2411, 15088, 1905, 28899, 63380, 33935, 10480, 12686, 25501, 17694, 15701, 53062, 49908, 21612, 38949, 6216, 46863, 9235, 2201, 6985, 9883, 12238, 18057, 21617, 39228, 49928, 54476, 62113, 64316, 12264, 32362, 58198, 2887, 3205, 8557, 9600, 9693, 44867, 53058, 55556, 57658, 2208, 10252, 10302, 14218, 33877, 10317, 10485, 25964, 14815, 1363, 1397, 14827, 21708, 3801, 64698, 2179 or 13249 expression or activity is intended to include the cases in which a mutation in the 15986, 2188, 20743, 9148, 9151, 9791, 44252, 14184, 42461, 8204, 7970, 25552, 21657, 26492, 2411, 15088, 1905, 28899, 63380, 33935, 10480, 12686, 25501, 17694, 15701, 53062, 49908, 21612, 38949, 6216, 46863, 9235, 2201, 6985, 9883, 12238, 18057, 21617, 39228, 49928, 54476, 62113, 64316, 12264, 32362, 58198, 2887, 3205, 8557, 9600, 9693, 44867, 53058, 55556, 57658, 2208, 10252, 10302, 14218, 33877, 10317, 10485, 25964, 14815, 1363, 1397, 14827, 21708, 3801, 64698, 2179 or 13249 gene causes the 15986, 2188, 20743, 9148, 9151, 9791, 44252, 14184, 42461, 8204, 7970, 25552, 21657, 26492, 2411, 15088, 1905, 28899, 63380, 33935, 10480, 12686, 25501, 17694, 15701, 53062, 49908, 21612, 38949, 6216, 46863, 9235, 2201, 6985, 9883, 12238, 18057, 21617, 39228, 49928, 54476, 62113, 64316, 12264, 32362, 58198, 2887, 3205, 8557, 9600, 9693, 44867, 53058, 55556, 57658, 2208, 10252, 10302, 14218, 33877, 10317, 10485, 25964, 14815, 1363, 1397, 14827, 21708, 3801, 64698, 2179 or 13249 gene to be under-expressed or over-expressed and situations in which such mutations result in a non-functional 15986, 2188, 20743, 9148, 9151, 9791, 44252, 14184, 42461, 8204, 7970, 25552, 21657, 26492, 2411, 15088, 1905, 28899, 63380, 33935, 10480, 12686, 25501, 17694, 15701, 53062, 49908, 21612, 38949, 6216, 46863, 9235, 2201, 6985, 9883, 12238, 18057, 21617, 39228, 49928, 54476, 62113, 64316, 12264, 32362, 58198, 2887, 3205, 8557, 9600, 9693, 44867, 53058, 55556, 57658, 2208, 10252, 10302, 14218, 33877, 10317, 10485, 25964, 14815, 1363, 1397, 14827, 21708, 3801, 64698, 2179 or 13249 protein or a protein which does not function in a wild-type fashion, e.g., a protein which does not interact with a 15986, 2188, 20743, 9148, 9151, 9791, 44252, 14184, 42461, 8204, 7970, 25552, 21657, 26492, 2411, 15088, 1905, 28899, 63380, 33935, 10480, 12686, 25501, 17694, 15701, 53062, 49908, 21612, 38949, 6216, 46863, 9235, 2201, 6985, 9883, 12238, 18057, 21617, 39228, 49928, 54476, 62113, 64316, 12264, 32362, 58198, 2887, 3205, 8557, 9600, 9693, 44867, 53058, 55556, 57658, 2208, 10252, 10302, 14218, 33877, 10317, 10485, 25964, 14815, 1363, 1397, 14827, 21708, 3801, 64698, 2179 or 13249 substrate, or one which interacts with a non-15986, 2188, 20743, 9148, 9151, 9791, 44252, 14184, 42461, 8204, 7970, 25552, 21657, 26492, 2411, 15088, 1905, 28899, 63380, 33935, 10480, 12686, 25501, 17694, 15701, 53062, 49908, 21612, 38949, 6216, 46863, 9235, 2201, 6985, 9883, 12238, 18057, 21617, 39228, 49928, 54476, 62113, 64316, 12264, 32362, 58198, 2887, 3205, 8557, 9600, 9693, 44867, 53058, 55556, 57658, 2208, 10252, 10302, 14218, 33877, 10317, 10485, 25964, 14815, 1363, 1397, 14827, 21708, 3801, 64698, 2179 or 13249 substrate.

[0911] The assays described herein, such as the preceding diagnostic assays or the following assays, can be used to identify a subject having or at risk of developing a disease. A biological sample may be obtained from a subject and tested for the presence or absence of a genetic alteration. For example, such genetic alterations can be detected by ascertaining the existence of at least one of 1) a deletion of one or more nucleotides from a 15986, 2188, 20743, 9148, 9151, 9791, 44252, 14184, 42461, 8204, 7970, 25552, 21657, 26492, 2411, 15088, 1905, 28899, 63380, 33935, 10480, 12686, 25501, 17694, 15701, 53062, 49908, 21612, 38949, 6216, 46863, 9235, 2201, 6985, 9883, 12238, 18057, 21617, 39228, 49928, 54476, 62113, 64316, 12264, 32362, 58198, 2887, 3205, 8557, 9600, 9693, 44867, 53058, 55556, 57658, 2208, 10252, 10302, 14218, 33877, 10317, 10485, 25964, 14815, 1363, 1397, 14827, 21708, 3801, 64698, 2179 or 13249 gene, 2) an addition of one or more nucleotides to a 15986, 2188, 20743, 9148, 9151, 9791, 44252, 14184, 42461, 8204, 7970, 25552, 21657, 26492, 2411, 15088, 1905, 28899, 63380, 33935, 10480, 12686, 25501, 17694, 15701, 53062, 49908, 21612, 38949, 6216, 46863, 9235, 2201, 6985, 9883, 12238, 18057, 21617, 39228, 49928, 54476, 62113, 64316, 12264, 32362, 58198, 2887, 3205, 8557, 9600, 9693, 44867, 53058, 55556, 57658, 2208, 10252, 10302, 14218, 33877, 10317, 10485, 25964, 14815, 1363, 1397, 14827, 21708, 3801, 64698, 2179 or 13249 gene, 3) a substitution of one or more nucleotides of a 15986, 2188, 20743, 9148, 9151, 9791, 44252, 14184, 42461, 8204, 7970, 25552, 21657, 26492, 2411, 15088, 1905, 28899, 63380, 33935, 10480, 12686, 25501, 17694, 15701, 53062, 49908, 21612, 38949, 6216, 46863, 9235, 2201, 6985, 9883, 12238, 18057, 21617, 39228, 49928, 54476, 62113, 64316, 12264, 32362, 58198, 2887, 3205, 8557, 9600, 9693, 44867, 53058, 55556, 57658, 2208, 10252, 10302, 14218, 33877, 10317, 10485, 25964, 14815, 1363, 1397, 14827, 21708, 3801, 64698, 2179 or 13249 gene, 4) a chromosomal rearrangement of a 15986, 2188, 20743, 9148, 9151, 9791, 44252, 14184, 42461, 8204, 7970, 25552, 21657, 26492, 2411, 15088, 1905, 28899, 63380, 33935, 10480, 12686, 25501, 17694, 15701, 53062, 49908, 21612, 38949, 6216, 46863, 9235, 2201, 6985, 9883, 12238, 18057, 21617, 39228, 49928, 54476, 62113, 64316, 12264, 32362, 58198, 2887, 3205, 8557, 9600, 9693, 44867, 53058, 55556, 57658, 2208, 10252, 10302, 14218, 33877, 10317, 10485, 25964, 14815, 1363, 1397, 14827, 21708, 3801, 64698, 2179 or 13249 gene, 5) an alteration in the level of a messenger RNA transcript of a 15986, 2188, 20743, 9148, 9151, 9791, 44252, 14184, 42461, 8204, 7970, 25552, 21657, 26492, 2411, 15088, 1905, 28899, 63380, 33935, 10480, 12686, 25501, 17694, 15701, 53062, 49908, 21612, 38949, 6216, 46863, 9235, 2201, 6985, 9883, 12238, 18057, 21617, 39228, 49928, 54476, 62113, 64316, 12264, 32362, 58198, 2887, 3205, 8557, 9600, 9693, 44867, 53058, 55556, 57658, 2208, 10252, 10302, 14218, 33877, 10317, 10485, 25964, 14815, 1363, 1397, 14827, 21708, 3801, 64698, 2179 or 13249 gene, 6) aberrant modification of a 15986, 2188, 20743, 9148, 9151, 9791, 44252, 14184, 42461, 8204, 7970, 25552, 21657, 26492, 2411, 15088, 1905, 28899, 63380, 33935, 10480, 12686, 25501, 17694, 15701, 53062, 49908, 21612, 38949, 6216, 46863, 9235, 2201, 6985, 9883, 12238, 18057, 21617, 39228, 49928, 54476, 62113, 64316, 12264, 32362, 58198, 2887, 3205, 8557, 9600, 9693, 44867, 53058, 55556, 57658, 2208, 10252, 10302, 14218, 33877, 10317, 10485, 25964, 14815, 1363, 1397, 14827, 21708, 3801, 64698, 2179 or 13249 gene, such as of the methylation pattern of the genomic DNA, 7) the presence of a non-wild type splicing pattern of a messenger RNA transcript of a 15986, 2188, 20743, 9148, 9151, 9791, 44252, 14184, 42461, 8204, 7970, 25552, 21657, 26492, 2411, 15088, 1905, 28899, 63380, 33935, 10480, 12686, 25501, 17694, 15701, 53062, 49908, 21612, 38949, 6216, 46863, 9235, 2201, 6985, 9883, 12238, 18057, 21617, 39228, 49928, 54476, 62113, 64316, 12264, 32362, 58198, 2887, 3205, 8557, 9600, 9693, 44867, 53058, 55556, 57658, 2208, 10252, 10302, 14218, 33877, 10317, 10485, 25964, 14815, 1363, 1397, 14827, 21708, 3801, 64698, 2179 or 13249 gene, 8) a non-wild type level of a 15986, 2188, 20743, 9148, 9151, 9791, 44252, 14184, 42461, 8204, 7970, 25552, 21657, 26492, 2411, 15088, 1905, 28899, 63380, 33935, 10480, 12686, 25501, 17694, 15701, 53062, 49908, 21612, 38949, 6216, 46863, 9235, 2201, 6985, 9883, 12238, 18057, 21617, 39228, 49928, 54476, 62113, 64316, 12264, 32362, 58198, 2887, 3205, 8557, 9600, 9693, 44867, 53058, 55556, 57658, 2208, 10252, 10302, 14218, 33877, 10317, 10485, 25964, 14815, 1363, 1397, 14827, 21708, 3801, 64698, 2179 or 13249-protein, 9) allelic loss of a 15986, 2188, 20743, 9148, 9151, 9791, 44252, 14184, 42461, 8204, 7970, 25552, 21657, 26492, 2411, 15088, 1905, 28899, 63380, 33935, 10480, 12686, 25501, 17694, 15701, 53062, 49908, 21612, 38949, 6216, 46863, 9235, 2201, 6985, 9883, 12238, 18057, 21617, 39228, 49928, 54476, 62113, 64316, 12264, 32362, 58198, 2887, 3205, 8557, 9600, 9693, 44867, 53058, 55556, 57658, 2208, 10252, 10302, 14218, 33877, 10317, 10485, 25964, 14815, 1363, 1397, 14827, 21708, 3801, 64698, 2179 or 13249 gene, and 10) inappropriate post-translational modification of a 15986, 2188, 20743, 9148, 9151, 9791, 44252, 14184, 42461, 8204, 7970, 25552, 21657, 26492, 2411, 15088, 1905, 28899, 63380, 33935, 10480, 12686, 25501, 17694, 15701, 53062, 49908, 21612, 38949, 6216, 46863, 9235, 2201, 6985, 9883, 12238, 18057, 21617, 39228, 49928, 54476, 62113, 64316, 12264, 32362, 58198, 2887, 3205, 8557, 9600, 9693, 44867, 53058, 55556, 57658, 2208, 10252, 10302, 14218, 33877, 10317, 10485, 25964, 14815, 1363, 1397, 14827, 21708, 3801, 64698, 2179 or 13249-protein.

[0912] As described herein, there are a large number of assays known in the art which can be used for detecting genetic alterations in a 15986, 2188, 20743, 9148, 9151, 9791, 44252, 14184, 42461, 8204, 7970, 25552, 21657, 26492, 2411, 15088, 1905, 28899, 63380, 33935, 10480, 12686, 25501, 17694, 15701, 53062, 49908, 21612, 38949, 6216, 46863, 9235, 2201, 6985, 9883, 12238, 18057, 21617, 39228, 49928, 54476, 62113, 64316, 12264, 32362, 58198, 2887, 3205, 8557, 9600, 9693, 44867, 53058, 55556, 57658, 2208, 10252, 10302, 14218, 33877, 10317, 10485, 25964, 14815, 1363, 1397, 14827, 21708, 3801, 64698, 2179 or 13249 gene. For example, a genetic alteration in a 15986, 2188, 20743, 9148, 9151, 9791, 44252, 14184, 42461, 8204, 7970, 25552, 21657, 26492, 2411, 15088, 1905, 28899, 63380, 33935, 10480, 12686, 25501, 17694, 15701, 53062, 49908, 21612, 38949, 6216, 46863, 9235, 2201, 6985, 9883, 12238, 18057, 21617, 39228, 49928, 54476, 62113, 64316, 12264, 32362, 58198, 2887, 3205, 8557, 9600, 9693, 44867, 53058, 55556, 57658, 2208, 10252, 10302, 14218, 33877, 10317, 10485, 25964, 14815, 1363, 1397, 14827, 21708, 3801, 64698, 2179 or 13249 gene may be detected using a probe/primer in a polymerase chain reaction (PCR) (see, e.g., U.S. Pat. Nos. 4,683,195 and 4, 683, 202), such as anchor PCR or RACE PCR, or, alternatively, in a ligation chain reaction (LCR) (see, e.g., Landegran et al. (1988) Science 241:1077-1080; and Nakazawa et al. (1994) Proc. Natl. Acad. Sci. USA 91:360-364), the latter of which can be particularly useful for detecting point mutations in a 15986, 2188, 20743, 9148, 9151, 9791, 44252, 14184, 42461, 8204, 7970, 25552, 21657, 26492, 2411, 15088, 1905, 28899, 63380, 33935, 10480, 12686, 25501, 17694, 15701, 53062, 49908, 21612, 38949, 6216, 46863, 9235, 2201, 6985, 9883, 12238, 18057, 21617, 39228, 49928, 54476, 62113, 64316, 12264, 32362, 58198, 2887, 3205, 8557, 9600, 9693, 44867, 53058, 55556, 57658, 2208, 10252, 10302, 14218, 33877, 10317, 10485, 25964, 14815, 1363, 1397, 14827, 21708, 3801, 64698, 2179 or 13249 gene (see Abravaya et al. (1995) Nucleic Acids Res. 23:675-682). This method includes collecting a biological sample from a subject, isolating nucleic acid (e.g., genomic DNA, mRNA or both) from the sample, contacting the nucleic acid sample with one or more primers which specifically hybridize to a 15986, 2188, 20743, 9148, 9151, 9791, 44252, 14184, 42461, 8204, 7970, 25552, 21657, 26492, 2411, 15088, 1905, 28899, 63380, 33935, 10480, 12686, 25501, 17694, 15701, 53062, 49908, 21612, 38949, 6216, 46863, 9235, 2201, 6985, 9883, 12238, 18057, 21617, 39228, 49928, 54476, 62113, 64316, 12264, 32362, 58198, 2887, 3205, 8557, 9600, 9693, 44867, 53058, 55556, 57658, 2208, 10252, 10302, 14218, 33877, 10317, 10485, 25964, 14815, 1363, 1397, 14827, 21708, 3801, 64698, 2179 or 13249 gene under conditions such that hybridization and amplification of the 15986, 2188, 20743, 9148, 9151, 9791, 44252, 14184, 42461, 8204, 7970, 25552, 21657, 26492, 2411, 15088, 1905, 28899, 63380, 33935, 10480, 12686, 25501, 17694, 15701, 53062, 49908, 21612, 38949, 6216, 46863, 9235, 2201, 6985, 9883, 12238, 18057, 21617, 39228, 49928, 54476, 62113, 64316, 12264, 32362, 58198, 2887, 3205, 8557, 9600, 9693, 44867, 53058, 55556, 57658, 2208, 10252, 10302, 14218, 33877, 10317, 10485, 25964, 14815, 1363, 1397, 14827, 21708, 3801, 64698, 2179 or 13249 gene (if present) occurs, and detecting the presence or absence of an amplification product, or detecting the size of the amplification product and comparing the length to a control sample. It is anticipated that PCR and/or LCR may be desirable to use as a preliminary amplification step in conjunction with any of the techniques used for detecting mutations described herein.

[0913] Alternative amplification methods include: self sustained sequence replication (Guatelli, J. C. et al. (1990) Proc. Natl. Acad. Sci. USA 87:1874-1878), transcriptional amplification system (Kwoh, D. Y. et al. (1989) Proc. Natl. Acad. Sci. USA 86:1173-1177), Q-Beta Replicase (Lizardi, P. M. et al. (1988) Bio-Technology 6:1197), or any other nucleic acid amplification method, followed by the detection of the amplified molecules using techniques well known to those of skill in the art. These detection schemes are especially useful for the detection of nucleic acid molecules if such molecules are present in very low numbers.

[0914] In an alternative embodiment, mutations in a 15986, 2188, 20743, 9148, 9151, 9791, 44252, 14184, 42461, 8204, 7970, 25552, 21657, 26492, 2411, 15088, 1905, 28899, 63380, 33935, 10480, 12686, 25501, 17694, 15701, 53062, 49908, 21612, 38949, 6216, 46863, 9235, 2201, 6985, 9883, 12238, 18057, 21617, 39228, 49928, 54476, 62113, 64316, 12264, 32362, 58198, 2887, 3205, 8557, 9600, 9693, 44867, 53058, 55556, 57658, 2208, 10252, 10302, 14218, 33877, 10317, 10485, 25964, 14815, 1363, 1397, 14827, 21708, 3801, 64698, 2179 or 13249 gene from a biological sample can be identified by alterations in restriction enzyme cleavage patterns. For example, sample and control DNA is isolated, amplified (optionally), digested with one or more restriction endonucleases, and fragment length sizes are determined by gel electrophoresis and compared. Differences in fragment length sizes between sample and control DNA indicates mutations in the sample DNA. Moreover, the use of sequence specific ribozymes (see, for example, U.S. Pat. No. 5,498,531) can be used to score for the presence of specific mutations by development or loss of a ribozyme cleavage site.

[0915] In other embodiments, genetic mutations in 15986, 2188, 20743, 9148, 9151, 9791, 44252, 14184, 42461, 8204, 7970, 25552, 21657, 26492, 2411, 15088, 1905, 28899, 63380, 33935, 10480, 12686, 25501, 17694, 15701, 53062, 49908, 21612, 38949, 6216, 46863, 9235, 2201, 6985, 9883, 12238, 18057, 21617, 39228, 49928, 54476, 62113, 64316, 12264, 32362, 58198, 2887, 3205, 8557, 9600, 9693, 44867, 53058, 55556, 57658, 2208, 10252, 10302, 14218, 33877, 10317, 10485, 25964, 14815, 1363, 1397, 14827, 21708, 3801, 64698, 2179 or 13249 can be identified by hybridizing biological sample derived and control nucleic acids, e.g., DNA or RNA, to high density arrays containing hundreds or thousands of oligonucleotide probes (Cronin, M. T. et al. (1996) Human Mutation 7:244-255; Kozal, M. J. et al. (1996) Nature Medicine 2:753-759). For example, genetic mutations in 15986, 2188, 20743, 9148, 9151, 9791, 44252, 14184, 42461, 8204, 7970, 25552, 21657, 26492, 2411, 15088, 1905, 28899, 63380, 33935, 10480, 12686, 25501, 17694, 15701, 53062, 49908, 21612, 38949, 6216, 46863, 9235, 2201, 6985, 9883, 12238, 18057, 21617, 39228, 49928, 54476, 62113, 64316, 12264, 32362, 58198, 2887, 3205, 8557, 9600, 9693, 44867, 53058, 55556, 57658, 2208, 10252, 10302, 14218, 33877, 10317, 10485, 25964, 14815, 1363, 1397, 14827, 21708, 3801, 64698, 2179 or 13249 can be identified in two dimensional arrays containing light-generated DNA probes as described in Cronin, M. T. et al. (1996) supra. Briefly, a first hybridization array of probes can be used to scan through long stretches of DNA in a sample and control to identify base changes between the sequences by making linear arrays of sequential, overlapping probes. This step allows for the identification of point mutations. This step is followed by a second hybridization array that allows for the characterization of specific mutations by using smaller, specialized probe arrays complementary to all variants or mutations detected. Each mutation array is composed of parallel probe sets, one complementary to the wild-type gene and the other complementary to the mutant gene.

[0916] In yet another embodiment, any of a variety of sequencing reactions known in the art can be used to directly sequence the 15986, 2188, 20743, 9148, 9151, 9791, 44252, 14184, 42461, 8204, 7970, 25552, 21657, 26492, 2411, 15088, 1905, 28899, 63380, 33935, 10480, 12686, 25501, 17694, 15701, 53062, 49908, 21612, 38949, 6216, 46863, 9235, 2201, 6985, 9883, 12238, 18057, 21617, 39228, 49928, 54476, 62113, 64316, 12264, 32362, 58198, 2887, 3205, 8557, 9600, 9693, 44867, 53058, 55556, 57658, 2208, 10252, 10302, 14218, 33877, 10317, 10485, 25964, 14815, 1363, 1397, 14827, 21708, 3801, 64698, 2179 or 13249 gene in a biological sample and detect mutations by comparing the sequence of the 15986, 2188, 20743, 9148, 9151, 9791, 44252, 14184, 42461, 8204, 7970, 25552, 21657, 26492, 2411, 15088, 1905, 28899, 63380, 33935, 10480, 12686, 25501, 17694, 15701, 53062, 49908, 21612, 38949, 6216, 46863, 9235, 2201, 6985, 9883, 12238, 18057, 21617, 39228, 49928, 54476, 62113, 64316, 12264, 32362, 58198, 2887, 3205, 8557, 9600, 9693, 44867, 53058, 55556, 57658, 2208, 10252, 10302, 14218, 33877, 10317, 10485, 25964, 14815, 1363, 1397, 14827, 21708, 3801, 64698, 2179 or 13249 in the biological sample with the corresponding wild-type (control) sequence. Examples of sequencing reactions include those based on techniques developed by Maxam and Gilbert (1977) Proc. Natl. Acad. Sci. USA 74:560) or Sanger (1977) Proc. Natl. Acad. Sci. USA 74:5463). It is also contemplated that any of a variety of automated sequencing procedures can be utilized when performing the diagnostic assays (Naeve, C. W. (1995) Biotechniques 19:448-53), including sequencing by mass spectrometry (see, e.g., PCT International Publication No. WO 94/16101; Cohen et al. (1996) Adv. Chromatogr. 36:127-162; and Griffin et al. (1993) Appl. Biochem. Biotechnol. 38:147-159).

[0917] Other methods for detecting mutations in the 15986, 2188, 20743, 9148, 9151, 9791, 44252, 14184, 42461, 8204, 7970, 25552, 21657, 26492, 2411, 15088, 1905, 28899, 63380, 33935, 10480, 12686, 25501, 17694, 15701, 53062, 49908, 21612, 38949, 6216, 46863, 9235, 2201, 6985, 9883, 12238, 18057, 21617, 39228, 49928, 54476, 62113, 64316, 12264, 32362, 58198, 2887, 3205, 8557, 9600, 9693, 44867, 53058, 55556, 57658, 2208, 10252, 10302, 14218, 33877, 10317, 10485, 25964, 14815, 1363, 1397, 14827, 21708, 3801, 64698, 2179 or 13249 gene include methods in which protection from cleavage agents is used to detect mismatched bases in RNA/RNA or RNA/DNA heteroduplexes (Myers et al. (1985) Science 230:1242). In general, the art technique of “mismatch cleavage” starts by providing heteroduplexes formed by hybridizing (labeled) RNA or DNA containing the wild-type 15986, 2188, 20743, 9148, 9151, 9791, 44252, 14184, 42461, 8204, 7970, 25552, 21657, 26492, 2411, 15088, 1905, 28899, 63380, 33935, 10480, 12686, 25501, 17694, 15701, 53062, 49908, 21612, 38949, 6216, 46863, 9235, 2201, 6985, 9883, 12238, 18057, 21617, 39228, 49928, 54476, 62113, 64316, 12264, 32362, 58198, 2887, 3205, 8557, 9600, 9693, 44867, 53058, 55556, 57658, 2208, 10252, 10302, 14218, 33877, 10317, 10485, 25964, 14815, 1363, 1397, 14827, 21708, 3801, 64698, 2179 or 13249 sequence with potentially mutant RNA or DNA obtained from a tissue sample. The double-stranded duplexes are treated with an agent which cleaves single-stranded regions of the duplex such as which will exist due to basepair mismatches between the control and sample strands. For instance, RNA/DNA duplexes can be treated with RNase and DNA/DNA hybrids treated with S1 nuclease to enzymatically digest the mismatched regions. In other embodiments, either DNA/DNA or RNA/DNA duplexes can be treated with hydroxylamine or osmium tetroxide and with piperidine in order to digest mismatched regions. After digestion of the mismatched regions, the resulting material is then separated by size on denaturing polyacrylamide gels to determine the site of mutation. See, for example, Cotton et al. (1988) Proc. Natl. Acad Sci USA 85:4397 and Saleeba et al. (1992) Methods Enzymol. 217:286-295. In a preferred embodiment, the control DNA or RNA can be labeled for detection.

[0918] In still another embodiment, the mismatch cleavage reaction employs one or more proteins that recognize mismatched base pairs in double-stranded DNA (so called “DNA mismatch repair” enzymes) in defined systems for detecting and mapping point mutations in 15986, 2188, 20743, 9148, 9151, 9791, 44252, 14184, 42461, 8204, 7970, 25552, 21657, 26492, 2411, 15088, 1905, 28899, 63380, 33935, 10480, 12686, 25501, 17694, 15701, 53062, 49908, 21612, 38949, 6216, 46863, 9235, 2201, 6985, 9883, 12238, 18057, 21617, 39228, 49928, 54476, 62113, 64316, 12264, 32362, 58198, 2887, 3205, 8557, 9600, 9693, 44867, 53058, 55556, 57658, 2208, 10252, 10302, 14218, 33877, 10317, 10485, 25964, 14815, 1363, 1397, 14827, 21708, 3801, 64698, 2179 or 13249 cDNAs obtained from samples of cells. For example, the mutY enzyme of E. coli cleaves A at G/A mismatches and the thymidine DNA glycosylase from HeLa cells cleaves T at G/T mismatches (Hsu et al. (1994) Carcinogenesis 15:1657-1662). According to an exemplary embodiment, a probe based on a 15986, 2188, 20743, 9148, 9151, 9791, 44252, 14184, 42461, 8204, 7970, 25552, 21657, 26492, 2411, 15088, 1905, 28899, 63380, 33935, 10480, 12686, 25501, 17694, 15701, 53062, 49908, 21612, 38949, 6216, 46863, 9235, 2201, 6985, 9883, 12238, 18057, 21617, 39228, 49928, 54476, 62113, 64316, 12264, 32362, 58198, 2887, 3205, 8557, 9600, 9693, 44867, 53058, 55556, 57658, 2208, 10252, 10302, 14218, 33877, 10317, 10485, 25964, 14815, 1363, 1397, 14827, 21708, 3801, 64698, 2179 or 13249 sequence, e.g., a wild-type 15986, 2188, 20743, 9148, 9151, 9791, 44252, 14184, 42461, 8204, 7970, 25552, 21657, 26492, 2411, 15088, 1905, 28899, 63380, 33935, 10480, 12686, 25501, 17694, 15701, 53062, 49908, 21612, 38949, 6216, 46863, 9235, 2201, 6985, 9883, 12238, 18057, 21617, 39228, 49928, 54476, 62113, 64316, 12264, 32362, 58198, 2887, 3205, 8557, 9600, 9693, 44867, 53058, 55556, 57658, 2208, 10252, 10302, 14218, 33877, 10317, 10485, 25964, 14815, 1363, 1397, 14827, 21708, 3801, 64698, 2179 or 13249 sequence, is hybridized to a cDNA or other DNA product from a test cell(s). The duplex is treated with a DNA mismatch repair enzyme, and the cleavage products, if any, can be detected from electrophoresis protocols or the like. See, for example, U.S. Pat. No. 5,459,039.

[0919] In other embodiments, alterations in electrophoretic mobility will be used to identify mutations in 15986, 2188, 20743, 9148, 9151, 9791, 44252, 14184, 42461, 8204, 7970, 25552, 21657, 26492, 2411, 15088, 1905, 28899, 63380, 33935, 10480, 12686, 25501, 17694, 15701, 53062, 49908, 21612, 38949, 6216, 46863, 9235, 2201, 6985, 9883, 12238, 18057, 21617, 39228, 49928, 54476, 62113, 64316, 12264, 32362, 58198, 2887, 3205, 8557, 9600, 9693, 44867, 53058, 55556, 57658, 2208, 10252, 10302, 14218, 33877, 10317, 10485, 25964, 14815, 1363, 1397, 14827, 21708, 3801, 64698, 2179 or 13249 genes. For example, single strand conformation polymorphism (SSCP) may be used to detect differences in electrophoretic mobility between mutant and wild type nucleic acids (Orita et al. (1989) Proc Natl. Acad. Sci USA: 86:2766; see also Cotton (1993) Mutat. Res. 285:125-144 and Hayashi (1992) Genet. Anal. Tech. Appl. 9:73-79). Single-stranded DNA fragments of sample and control 15986, 2188, 20743, 9148, 9151, 9791, 44252, 14184, 42461, 8204, 7970, 25552, 21657, 26492, 2411, 15088, 1905, 28899, 63380, 33935, 10480, 12686, 25501, 17694, 15701, 53062, 49908, 21612, 38949, 6216, 46863, 9235, 2201, 6985, 9883, 12238, 18057, 21617, 39228, 49928, 54476, 62113, 64316, 12264, 32362, 58198, 2887, 3205, 8557, 9600, 9693, 44867, 53058, 55556, 57658, 2208, 10252, 10302, 14218, 33877, 10317, 10485, 25964, 14815, 1363, 1397, 14827, 21708, 3801, 64698, 2179 or 13249 nucleic acids will be denatured and allowed to renature. The secondary structure of single-stranded nucleic acids varies according to sequence, the resulting alteration in electrophoretic mobility enables the detection of even a single base change. The DNA fragments may be labeled or detected with labeled probes. The sensitivity of the assay may be enhanced by using RNA (rather than DNA), in which the secondary structure is more sensitive to a change in sequence. In a preferred embodiment, the subject method utilizes heteroduplex analysis to separate double stranded heteroduplex molecules on the basis of changes in electrophoretic mobility (Keen et al. (1991) Trends Genet 7:5).

[0920] In yet another embodiment the movement of mutant or wild-type fragments in polyacrylamide gels containing a gradient of denaturant is assayed using denaturing gradient gel electrophoresis (DGGE) (Myers et al. (1985) Nature 313:495). When DGGE is used as the method of analysis, DNA will be modified to ensure that it does not completely denature, for example by adding a GC clamp of approximately 40 bp of high-melting GC-rich DNA by PCR. In a further embodiment, a temperature gradient is used in place of a denaturing gradient to identify differences in the mobility of control and sample DNA (Rosenbaum and Reissner (1987) Biophys Chem 265:12753).

[0921] Examples of other techniques for detecting point mutations include, but are not limited to, selective oligonucleotide hybridization, selective amplification, or selective primer extension. For example, oligonucleotide primers may be prepared in which the known mutation is placed centrally and then hybridized to target DNA under conditions which permit hybridization only if a perfect match is found (Saiki et al. (1986) Nature 324:163); Saiki et al. (1989) Proc. Natl. Acad. Sci USA 86:6230). Such allele specific oligonucleotides are hybridized to PCR amplified target DNA or a number of different mutations when the oligonucleotides are attached to the hybridizing membrane and hybridized with labeled target DNA.

[0922] Alternatively, allele specific amplification technology which depends on selective PCR amplification may be used in conjunction with the instant invention. Oligonucleotides used as primers for specific amplification may carry the mutation of interest in the center of the molecule (so that amplification depends on differential hybridization) (Gibbs et al. (1989) Nucleic Acids Res. 17:2437-2448) or at the extreme 3′ end of one primer where, under appropriate conditions, mismatch can prevent, or reduce polymerase extension (Prossner (1993) Tibtech 11:238). In addition it may be desirable to introduce a novel restriction site in the region of the mutation to create cleavage-based detection (Gasparini et al. (1992) Mol. Cell Probes 6:1). It is anticipated that in certain embodiments amplification may also be performed using Taq ligase for amplification (Barany (1991) Proc. Natl. Acad. Sci USA 88:189). In such cases, ligation will occur only if there is a perfect match at the 3′ end of the 5′ sequence making it possible to detect the presence of a known mutation at a specific site by looking for the presence or absence of amplification.

[0923] Furthermore, the prognostic assays described herein can be used to determine whether a subject can be administered a 15986, 2188, 20743, 9148, 9151, 9791, 44252, 14184, 42461, 8204, 7970, 25552, 21657, 26492, 2411, 15088, 1905, 28899, 63380, 33935, 10480, 12686, 25501, 17694, 15701, 53062, 49908, 21612, 38949, 6216, 46863, 9235, 2201, 6985, 9883, 12238, 18057, 21617, 39228, 49928, 54476, 62113, 64316, 12264, 32362, 58198, 2887, 3205, 8557, 9600, 9693, 44867, 53058, 55556, 57658, 2208, 10252, 10302, 14218, 33877, 10317, 10485, 25964, 14815, 1363, 1397, 14827, 21708, 3801, 64698, 2179 or 13249 modulator (e.g., an agonist, antagonist, peptidomimetic, protein, peptide, nucleic acid, or small molecule) to effectively treat a disease.

[0924] Monitoring of Effects During Clinical Trials

[0925] The present invention further provides methods for determining the effectiveness of a 15986, 2188, 20743, 9148, 9151, 9791, 44252, 14184, 42461, 8204, 7970, 25552, 21657, 26492, 2411, 15088, 1905, 28899, 63380, 33935, 10480, 12686, 25501, 17694, 15701, 53062, 49908, 21612, 38949, 6216, 46863, 9235, 2201, 6985, 9883, 12238, 18057, 21617, 39228, 49928, 54476, 62113, 64316, 12264, 32362, 58198, 2887, 3205, 8557, 9600, 9693, 44867, 53058, 55556, 57658, 2208, 10252, 10302, 14218, 33877, 10317, 10485, 25964, 14815, 1363, 1397, 14827, 21708, 3801, 64698, 2179 or 13249 modulator (e.g., a 15986, 2188, 20743, 9148, 9151, 9791, 44252, 14184, 42461, 8204, 7970, 25552, 21657, 26492, 2411, 15088, 1905, 28899, 63380, 33935, 10480, 12686, 25501, 17694, 15701, 53062, 49908, 21612, 38949, 6216, 46863, 9235, 2201, 6985, 9883, 12238, 18057, 21617, 39228, 49928, 54476, 62113, 64316, 12264, 32362, 58198, 2887, 3205, 8557, 9600, 9693, 44867, 53058, 55556, 57658, 2208, 10252, 10302, 14218, 33877, 10317, 10485, 25964, 14815, 1363, 1397, 14827, 21708, 3801, 64698, 2179 or 13249 modulator identified herein) in treating a disease. For example, the effectiveness of a 15986, 2188, 20743, 9148, 9151, 9791, 44252, 14184, 42461, 8204, 7970, 25552, 21657, 26492, 2411, 15088, 1905, 28899, 63380, 33935, 10480, 12686, 25501, 17694, 15701, 53062, 49908, 21612, 38949, 6216, 46863, 9235, 2201, 6985, 9883, 12238, 18057, 21617, 39228, 49928, 54476, 62113, 64316, 12264, 32362, 58198, 2887, 3205, 8557, 9600, 9693, 44867, 53058, 55556, 57658, 2208, 10252, 10302, 14218, 33877, 10317, 10485, 25964, 14815, 1363, 1397, 14827, 21708, 3801, 64698, 2179 or 13249 modulator in increasing 15986, 2188, 20743, 9148, 9151, 9791, 44252, 14184, 42461, 8204, 7970, 25552, 21657, 26492, 2411, 15088, 1905, 28899, 63380, 33935, 10480, 12686, 25501, 17694, 15701, 53062, 49908, 21612, 38949, 6216, 46863, 9235, 2201, 6985, 9883, 12238, 18057, 21617, 39228, 49928, 54476, 62113, 64316, 12264, 32362, 58198, 2887, 3205, 8557, 9600, 9693, 44867, 53058, 55556, 57658, 2208, 10252, 10302, 14218, 33877, 10317, 10485, 25964, 14815, 1363, 1397, 14827, 21708, 3801, 64698, 2179 or 13249 gene expression, protein levels, or in upregulating 15986, 2188, 20743, 9148, 9151, 9791, 44252, 14184, 42461, 8204, 7970, 25552, 21657, 26492, 2411, 15088, 1905, 28899, 63380, 33935, 10480, 12686, 25501, 17694, 15701, 53062, 49908, 21612, 38949, 6216, 46863, 9235, 2201, 6985, 9883, 12238, 18057, 21617, 39228, 49928, 54476, 62113, 64316, 12264, 32362, 58198, 2887, 3205, 8557, 9600, 9693, 44867, 53058, 55556, 57658, 2208, 10252, 10302, 14218, 33877, 10317, 10485, 25964, 14815, 1363, 1397, 14827, 21708, 3801, 64698, 2179 or 13249 activity, can be monitored in clinical trials of subjects exhibiting decreased 15986, 2188, 20743, 9148, 9151, 9791, 44252, 14184, 42461, 8204, 7970, 25552, 21657, 26492, 2411, 15088, 1905, 28899, 63380, 33935, 10480, 12686, 25501, 17694, 15701, 53062, 49908, 21612, 38949, 6216, 46863, 9235, 2201, 6985, 9883, 12238, 18057, 21617, 39228, 49928, 54476, 62113, 64316, 12264, 32362, 58198, 2887, 3205, 8557, 9600, 9693, 44867, 53058, 55556, 57658, 2208, 10252, 10302, 14218, 33877, 10317, 10485, 25964, 14815, 1363, 1397, 14827, 21708, 3801, 64698, 2179 or 13249 gene expression, protein levels, or downregulated 15986, 2188, 20743, 9148, 9151, 9791, 44252, 14184, 42461, 8204, 7970, 25552, 21657, 26492, 2411, 15088, 1905, 28899, 63380, 33935, 10480, 12686, 25501, 17694, 15701, 53062, 49908, 21612, 38949, 6216, 46863, 9235, 2201, 6985, 9883, 12238, 18057, 21617, 39228, 49928, 54476, 62113, 64316, 12264, 32362, 58198, 2887, 3205, 8557, 9600, 9693, 44867, 53058, 55556, 57658, 2208, 10252, 10302, 14218, 33877, 10317, 10485, 25964, 14815, 1363, 1397, 14827, 21708, 3801, 64698, 2179 or 13249 activity. Alternatively, the effectiveness of a 15986, 2188, 20743, 9148, 9151, 9791, 44252, 14184, 42461, 8204, 7970, 25552, 21657, 26492, 2411, 15088, 1905, 28899, 63380, 33935, 10480, 12686, 25501, 17694, 15701, 53062, 49908, 21612, 38949, 6216, 46863, 9235, 2201, 6985, 9883, 12238, 18057, 21617, 39228, 49928, 54476, 62113, 64316, 12264, 32362, 58198, 2887, 3205, 8557, 9600, 9693, 44867, 53058, 55556, 57658, 2208, 10252, 10302, 14218, 33877, 10317, 10485, 25964, 14815, 1363, 1397, 14827, 21708, 3801, 64698, 2179 or 13249 modulator in decreasing 15986, 2188, 20743, 9148, 9151, 9791, 44252, 14184, 42461, 8204, 7970, 25552, 21657, 26492, 2411, 15088, 1905, 28899, 63380, 33935, 10480, 12686, 25501, 17694, 15701, 53062, 49908, 21612, 38949, 6216, 46863, 9235, 2201, 6985, 9883, 12238, 18057, 21617, 39228, 49928, 54476, 62113, 64316, 12264, 32362, 58198, 2887, 3205, 8557, 9600, 9693, 44867, 53058, 55556, 57658, 2208, 10252, 10302, 14218, 33877, 10317, 10485, 25964, 14815, 1363, 1397, 14827, 21708, 3801, 64698, 2179 or 13249 gene expression, protein levels, or in downregulating 15986, 2188, 20743, 9148, 9151, 9791, 44252, 14184, 42461, 8204, 7970, 25552, 21657, 26492, 2411, 15088, 1905, 28899, 63380, 33935, 10480, 12686, 25501, 17694, 15701, 53062, 49908, 21612, 38949, 6216, 46863, 9235, 2201, 6985, 9883, 12238, 18057, 21617, 39228, 49928, 54476, 62113, 64316, 12264, 32362, 58198, 2887, 3205, 8557, 9600, 9693, 44867, 53058, 55556, 57658, 2208, 10252, 10302, 14218, 33877, 10317, 10485, 25964, 14815, 1363, 1397, 14827, 21708, 3801, 64698, 2179 or 13249 activity, can be monitored in clinical trials of subjects exhibiting increased 15986, 2188, 20743, 9148, 9151, 9791, 44252, 14184, 42461, 8204, 7970, 25552, 21657, 26492, 2411, 15088, 1905, 28899, 63380, 33935, 10480, 12686, 25501, 17694, 15701, 53062, 49908, 21612, 38949, 6216, 46863, 9235, 2201, 6985, 9883, 12238, 18057, 21617, 39228, 49928, 54476, 62113, 64316, 12264, 32362, 58198, 2887, 3205, 8557, 9600, 9693, 44867, 53058, 55556, 57658, 2208, 10252, 10302, 14218, 33877, 10317, 10485, 25964, 14815, 1363, 1397, 14827, 21708, 3801, 64698, 2179 or 13249 gene expression, protein levels, or 15986, 2188, 20743, 9148, 9151, 9791, 44252, 14184, 42461, 8204, 7970, 25552, 21657, 26492, 2411, 15088, 1905, 28899, 63380, 33935, 10480, 12686, 25501, 17694, 15701, 53062, 49908, 21612, 38949, 6216, 46863, 9235, 2201, 6985, 9883, 12238, 18057, 21617, 39228, 49928, 54476, 62113, 64316, 12264, 32362, 58198, 2887, 3205, 8557, 9600, 9693, 44867, 53058, 55556, 57658, 2208, 10252, 10302, 14218, 33877, 10317, 10485, 25964, 14815, 1363, 1397, 14827, 21708, 3801, 64698, 2179 or 13249 activity. In such clinical trials, the expression or activity of a 15986, 2188, 20743, 9148, 9151, 9791, 44252, 14184, 42461, 8204, 7970, 25552, 21657, 26492, 2411, 15088, 1905, 28899, 63380, 33935, 10480, 12686, 25501, 17694, 15701, 53062, 49908, 21612, 38949, 6216, 46863, 9235, 2201, 6985, 9883, 12238, 18057, 21617, 39228, 49928, 54476, 62113, 64316, 12264, 32362, 58198, 2887, 3205, 8557, 9600, 9693, 44867, 53058, 55556, 57658, 2208, 10252, 10302, 14218, 33877, 10317, 10485, 25964, 14815, 1363, 1397, 14827, 21708, 3801, 64698, 2179 or 13249 gene, and preferably, other genes that have been implicated in nociception can be used as a “read out” or marker of the phenotype of a particular cell.

[0926] For example, and not by way of limitation, genes, including 15986, 2188, 20743, 9148, 9151, 9791, 44252, 14184, 42461, 8204, 7970, 25552, 21657, 26492, 2411, 15088, 1905, 28899, 63380, 33935, 10480, 12686, 25501, 17694, 15701, 53062, 49908, 21612, 38949, 6216, 46863, 9235, 2201, 6985, 9883, 12238, 18057, 21617, 39228, 49928, 54476, 62113, 64316, 12264, 32362, 58198, 2887, 3205, 8557, 9600, 9693, 44867, 53058, 55556, 57658, 2208, 10252, 10302, 14218, 33877, 10317, 10485, 25964, 14815, 1363, 1397, 14827, 21708, 3801, 64698, 2179 or 13249, that are modulated in cells by treatment with an agent which modulates 15986, 2188, 20743, 9148, 9151, 9791, 44252, 14184, 42461, 8204, 7970, 25552, 21657, 26492, 2411, 15088, 1905, 28899, 63380, 33935, 10480, 12686, 25501, 17694, 15701, 53062, 49908, 21612, 38949, 6216, 46863, 9235, 2201, 6985, 9883, 12238, 18057, 21617, 39228, 49928, 54476, 62113, 64316, 12264, 32362, 58198, 2887, 3205, 8557, 9600, 9693, 44867, 53058, 55556, 57658, 2208, 10252, 10302, 14218, 33877, 10317, 10485, 25964, 14815, 1363, 1397, 14827, 21708, 3801, 64698, 2179 or 13249 activity (e.g., identified in a screening assay as described herein) can be identified. Thus, to study the effect of agents which modulate 15986, 2188, 20743, 9148, 9151, 9791, 44252, 14184, 42461, 8204, 7970, 25552, 21657, 26492, 2411, 15088, 1905, 28899, 63380, 33935, 10480, 12686, 25501, 17694, 15701, 53062, 49908, 21612, 38949, 6216, 46863, 9235, 2201, 6985, 9883, 12238, 18057, 21617, 39228, 49928, 54476, 62113, 64316, 12264, 32362, 58198, 2887, 3205, 8557, 9600, 9693, 44867, 53058, 55556, 57658, 2208, 10252, 10302, 14218, 33877, 10317, 10485, 25964, 14815, 1363, 1397, 14827, 21708, 3801, 64698, 2179 or 13249 activity on subjects suffering from a cancer in, for example, a clinical trial, cells can be isolated and RNA prepared and analyzed for the levels of expression of 15986, 2188, 20743, 9148, 9151, 9791, 44252, 14184, 42461, 8204, 7970, 25552, 21657, 26492, 2411, 15088, 1905, 28899, 63380, 33935, 10480, 12686, 25501, 17694, 15701, 53062, 49908, 21612, 38949, 6216, 46863, 9235, 2201, 6985, 9883, 12238, 18057, 21617, 39228, 49928, 54476, 62113, 64316, 12264, 32362, 58198, 2887, 3205, 8557, 9600, 9693, 44867, 53058, 55556, 57658, 2208, 10252, 10302, 14218, 33877, 10317, 10485, 25964, 14815, 1363, 1397, 14827, 21708, 3801, 64698, 2179 or 13249 and other genes implicated in the cancer. The levels of gene expression (e.g., a gene expression pattern) can be quantified by Northern blot analysis or RT-PCR, as described herein, or alternatively by measuring the amount of protein produced, by one of the methods described herein, or by measuring the levels of activity of 15986, 2188, 20743, 9148, 9151, 9791, 44252, 14184, 42461, 8204, 7970, 25552, 21657, 26492, 2411, 15088, 1905, 28899, 63380, 33935, 10480, 12686, 25501, 17694, 15701, 53062, 49908, 21612, 38949, 6216, 46863, 9235, 2201, 6985, 9883, 12238, 18057, 21617, 39228, 49928, 54476, 62113, 64316, 12264, 32362, 58198, 2887, 3205, 8557, 9600, 9693, 44867, 53058, 55556, 57658, 2208, 10252, 10302, 14218, 33877, 10317, 10485, 25964, 14815, 1363, 1397, 14827, 21708, 3801, 64698, 2179 or 13249 or other genes. In this way, the gene expression pattern can serve as a marker, indicative of the physiological response of the cells to the agent which modulates 15986, 2188, 20743, 9148, 9151, 9791, 44252, 14184, 42461, 8204, 7970, 25552, 21657, 26492, 2411, 15088, 1905, 28899, 63380, 33935, 10480, 12686, 25501, 17694, 15701, 53062, 49908, 21612, 38949, 6216, 46863, 9235, 2201, 6985, 9883, 12238, 18057, 21617, 39228, 49928, 54476, 62113, 64316, 12264, 32362, 58198, 2887, 3205, 8557, 9600, 9693, 44867, 53058, 55556, 57658, 2208, 10252, 10302, 14218, 33877, 10317, 10485, 25964, 14815, 1363, 1397, 14827, 21708, 3801, 64698, 2179 or 13249 activity. This response state may be determined before, and at various points during treatment of the individual with the agent which modulates 15986, 2188, 20743, 9148, 9151, 9791, 44252, 14184, 42461, 8204, 7970, 25552, 21657, 26492, 2411, 15088, 1905, 28899, 63380, 33935, 10480, 12686, 25501, 17694, 15701, 53062, 49908, 21612, 38949, 6216, 46863, 9235, 2201, 6985, 9883, 12238, 18057, 21617, 39228, 49928, 54476, 62113, 64316, 12264, 32362, 58198, 2887, 3205, 8557, 9600, 9693, 44867, 53058, 55556, 57658, 2208, 10252, 10302, 14218, 33877, 10317, 10485, 25964, 14815, 1363, 1397, 14827, 21708, 3801, 64698, 2179 or 13249 activity.

[0927] In a preferred embodiment, the present invention provides a method for monitoring the effectiveness of treatment of a subject with an agent which modulates 15986, 2188, 20743, 9148, 9151, 9791, 44252, 14184, 42461, 8204, 7970, 25552, 21657, 26492, 2411, 15088, 1905, 28899, 63380, 33935, 10480, 12686, 25501, 17694, 15701, 53062, 49908, 21612, 38949, 6216, 46863, 9235, 2201, 6985, 9883, 12238, 18057, 21617, 39228, 49928, 54476, 62113, 64316, 12264, 32362, 58198, 2887, 3205, 8557, 9600, 9693, 44867, 53058, 55556, 57658, 2208, 10252, 10302, 14218, 33877, 10317, 10485, 25964, 14815, 1363, 1397, 14827, 21708, 3801, 64698, 2179 or 13249 activity (e.g., an agonist, antagonist, peptidomimetic, protein, peptide, nucleic acid, or small molecule identified by the screening assays described herein) including the steps of (i) obtaining a pre-administration sample from a subject prior to administration of the agent; (ii) detecting the level of expression of a 15986, 2188, 20743, 9148, 9151, 9791, 44252, 14184, 42461, 8204, 7970, 25552, 21657, 26492, 2411, 15088, 1905, 28899, 63380, 33935, 10480, 12686, 25501, 17694, 15701, 53062, 49908, 21612, 38949, 6216, 46863, 9235, 2201, 6985, 9883, 12238, 18057, 21617, 39228, 49928, 54476, 62113, 64316, 12264, 32362, 58198, 2887, 3205, 8557, 9600, 9693, 44867, 53058, 55556, 57658, 2208, 10252, 10302, 14218, 33877, 10317, 10485, 25964, 14815, 1363, 1397, 14827, 21708, 3801, 64698, 2179 or 13249 protein, mRNA, or genomic DNA in the pre-administration sample; (iii) obtaining one or more post-administration samples from the subject; (iv) detecting the level of expression or activity of the 15986, 2188, 20743, 9148, 9151, 9791, 44252, 14184, 42461, 8204, 7970, 25552, 21657, 26492, 2411, 15088, 1905, 28899, 63380, 33935, 10480, 12686, 25501, 17694, 15701, 53062, 49908, 21612, 38949, 6216, 46863, 9235, 2201, 6985, 9883, 12238, 18057, 21617, 39228, 49928, 54476, 62113, 64316, 12264, 32362, 58198, 2887, 3205, 8557, 9600, 9693, 44867, 53058, 55556, 57658, 2208, 10252, 10302, 14218, 33877, 10317, 10485, 25964, 14815, 1363, 1397, 14827, 21708, 3801, 64698, 2179 or 13249 protein, mRNA, or genomic DNA in the post-administration samples; (v) comparing the level of expression or activity of the 15986, 2188, 20743, 9148, 9151, 9791, 44252, 14184, 42461, 8204, 7970, 25552, 21657, 26492, 2411, 15088, 1905, 28899, 63380, 33935, 10480, 12686, 25501, 17694, 15701, 53062, 49908, 21612, 38949, 6216, 46863, 9235, 2201, 6985, 9883, 12238, 18057, 21617, 39228, 49928, 54476, 62113, 64316, 12264, 32362, 58198, 2887, 3205, 8557, 9600, 9693, 44867, 53058, 55556, 57658, 2208, 10252, 10302, 14218, 33877, 10317, 10485, 25964, 14815, 1363, 1397, 14827, 21708, 3801, 64698, 2179 or 13249 protein, mRNA, or genomic DNA in the pre-administration sample with the 15986, 2188, 20743, 9148, 9151, 9791, 44252, 14184, 42461, 8204, 7970, 25552, 21657, 26492, 2411, 15088, 1905, 28899, 63380, 33935, 10480, 12686, 25501, 17694, 15701, 53062, 49908, 21612, 38949, 6216, 46863, 9235, 2201, 6985, 9883, 12238, 18057, 21617, 39228, 49928, 54476, 62113, 64316, 12264, 32362, 58198, 2887, 3205, 8557, 9600, 9693, 44867, 53058, 55556, 57658, 2208, 10252, 10302, 14218, 33877, 10317, 10485, 25964, 14815, 1363, 1397, 14827, 21708, 3801, 64698, 2179 or 13249 protein, mRNA, or genomic DNA in the post administration sample or samples; and (vi) altering the administration of the agent to the subject accordingly. For example, increased administration of the agent may be desirable to increase the expression or activity of 15986, 2188, 20743, 9148, 9151, 9791, 44252, 14184, 42461, 8204, 7970, 25552, 21657, 26492, 2411, 15088, 1905, 28899, 63380, 33935, 10480, 12686, 25501, 17694, 15701, 53062, 49908, 21612, 38949, 6216, 46863, 9235, 2201, 6985, 9883, 12238, 18057, 21617, 39228, 49928, 54476, 62113, 64316, 12264, 32362, 58198, 2887, 3205, 8557, 9600, 9693, 44867, 53058, 55556, 57658, 2208, 10252, 10302, 14218, 33877, 10317, 10485, 25964, 14815, 1363, 1397, 14827, 21708, 3801, 64698, 2179 or 13249 to higher levels than detected, i.e., to increase the effectiveness of the agent. Alternatively, decreased administration of the agent may be desirable to decrease expression or activity of 15986, 2188, 20743, 9148, 9151, 9791, 44252, 14184, 42461, 8204, 7970, 25552, 21657, 26492, 2411, 15088, 1905, 28899, 63380, 33935, 10480, 12686, 25501, 17694, 15701, 53062, 49908, 21612, 38949, 6216, 46863, 9235, 2201, 6985, 9883, 12238, 18057, 21617, 39228, 49928, 54476, 62113, 64316, 12264, 32362, 58198, 2887, 3205, 8557, 9600, 9693, 44867, 53058, 55556, 57658, 2208, 10252, 10302, 14218, 33877, 10317, 10485, 25964, 14815, 1363, 1397, 14827, 21708, 3801, 64698, 2179 or 13249 to lower levels than detected, i.e. to decrease the effectiveness of the agent. According to such an embodiment, 15986, 2188, 20743, 9148, 9151, 9791, 44252, 14184, 42461, 8204, 7970, 25552, 21657, 26492, 2411, 15088, 1905, 28899, 63380, 33935, 10480, 12686, 25501, 17694, 15701, 53062, 49908, 21612, 38949, 6216, 46863, 9235, 2201, 6985, 9883, 12238, 18057, 21617, 39228, 49928, 54476, 62113, 64316, 12264, 32362, 58198, 2887, 3205, 8557, 9600, 9693, 44867, 53058, 55556, 57658, 2208, 10252, 10302, 14218, 33877, 10317, 10485, 25964, 14815, 1363, 1397, 14827, 21708, 3801, 64698, 2179 or 13249 expression or activity may be used as an indicator of the effectiveness of an agent, even in the absence of an observable phenotypic response.

[0928] Methods of Treatment:

[0929] The present invention provides for both prophylactic and therapeutic methods of treating a subject, e.g., a human, at risk of (or susceptible to) a disease. With regard to both prophylactic and therapeutic methods of treatment, such treatments may be specifically tailored or modified, based on knowledge obtained from the field of pharmacogenomics. “Pharmacogenomics,” as used herein, refers to the application of genomics technologies such as gene sequencing, statistical genetics, and gene expression analysis to drugs in clinical development and on the market. More specifically, the term refers to the study of how a patient's genes determine his or her response to a drug (e.g., a patient's “drug response phenotype”, or “drug response genotype”).

[0930] Thus, another aspect of the invention provides methods for tailoring an subject's prophylactic or therapeutic treatment with either the 15986, 2188, 20743, 9148, 9151, 9791, 44252, 14184, 42461, 8204, 7970, 25552, 21657, 26492, 2411, 15088, 1905, 28899, 63380, 33935, 10480, 12686, 25501, 17694, 15701, 53062, 49908, 21612, 38949, 6216, 46863, 9235, 2201, 6985, 9883, 12238, 18057, 21617, 39228, 49928, 54476, 62113, 64316, 12264, 32362, 58198, 2887, 3205, 8557, 9600, 9693, 44867, 53058, 55556, 57658, 2208, 10252, 10302, 14218, 33877, 10317, 10485, 25964, 14815, 1363, 1397, 14827, 21708, 3801, 64698, 2179 or 13249 molecules of the present invention or 15986, 2188, 20743, 9148, 9151, 9791, 44252, 14184, 42461, 8204, 7970, 25552, 21657, 26492, 2411, 15088, 1905, 28899, 63380, 33935, 10480, 12686, 25501, 17694, 15701, 53062, 49908, 21612, 38949, 6216, 46863, 9235, 2201, 6985, 9883, 12238, 18057, 21617, 39228, 49928, 54476, 62113, 64316, 12264, 32362, 58198, 2887, 3205, 8557, 9600, 9693, 44867, 53058, 55556, 57658, 2208, 10252, 10302, 14218, 33877, 10317, 10485, 25964, 14815, 1363, 1397, 14827, 21708, 3801, 64698, 2179 or 13249 modulators according to that individual's drug response genotype. Pharmacogenomics allows a clinician or physician to target prophylactic or therapeutic treatments to patients who will most benefit from the treatment and to avoid treatment of patients who will experience toxic drug-related side effects.

[0931] Prophylactic Methods

[0932] In one aspect, the invention provides a method for preventing in a subject, a disease by administering to the subject an agent which modulates 15986, 2188, 20743, 9148, 9151, 9791, 44252, 14184, 42461, 8204, 7970, 25552, 21657, 26492, 2411, 15088, 1905, 28899, 63380, 33935, 10480, 12686, 25501, 17694, 15701, 53062, 49908, 21612, 38949, 6216, 46863, 9235, 2201, 6985, 9883, 12238, 18057, 21617, 39228, 49928, 54476, 62113, 64316, 12264, 32362, 58198, 2887, 3205, 8557, 9600, 9693, 44867, 53058, 55556, 57658, 2208, 10252, 10302, 14218, 33877, 10317, 10485, 25964, 14815, 1363, 1397, 14827, 21708, 3801, 64698, 2179 or 13249 expression or 15986, 2188, 20743, 9148, 9151, 9791, 44252, 14184, 42461, 8204, 7970, 25552, 21657, 26492, 2411, 15088, 1905, 28899, 63380, 33935, 10480, 12686, 25501, 17694, 15701, 53062, 49908, 21612, 38949, 6216, 46863, 9235, 2201, 6985, 9883, 12238, 18057, 21617, 39228, 49928, 54476, 62113, 64316, 12264, 32362, 58198, 2887, 3205, 8557, 9600, 9693, 44867, 53058, 55556, 57658, 2208, 10252, 10302, 14218, 33877, 10317, 10485, 25964, 14815, 1363, 1397, 14827, 21708, 3801, 64698, 2179 or 13249 activity. Subjects at risk for a cancer, e.g., lung, colon, prostate, ovarian or breast cancer, can be identified by, for example, any or a combination of the diagnostic or prognostic assays described herein. Administration of a prophylactic agent can occur prior to the manifestation of symptoms characteristic of aberrant 15986, 2188, 20743, 9148, 9151, 9791, 44252, 14184, 42461, 8204, 7970, 25552, 21657, 26492, 2411, 15088, 1905, 28899, 63380, 33935, 10480, 12686, 25501, 17694, 15701, 53062, 49908, 21612, 38949, 6216, 46863, 9235, 2201, 6985, 9883, 12238, 18057, 21617, 39228, 49928, 54476, 62113, 64316, 12264, 32362, 58198, 2887, 3205, 8557, 9600, 9693, 44867, 53058, 55556, 57658, 2208, 10252, 10302, 14218, 33877, 10317, 10485, 25964, 14815, 1363, 1397, 14827, 21708, 3801, 64698, 2179 or 13249 expression or activity, such that a disease is prevented or, alternatively, delayed in its progression. Depending on the type of 15986, 2188, 20743, 9148, 9151, 9791, 44252, 14184, 42461, 8204, 7970, 25552, 21657, 26492, 2411, 15088, 1905, 28899, 63380, 33935, 10480, 12686, 25501, 17694, 15701, 53062, 49908, 21612, 38949, 6216, 46863, 9235, 2201, 6985, 9883, 12238, 18057, 21617, 39228, 49928, 54476, 62113, 64316, 12264, 32362, 58198, 2887, 3205, 8557, 9600, 9693, 44867, 53058, 55556, 57658, 2208, 10252, 10302, 14218, 33877, 10317, 10485, 25964, 14815, 1363, 1397, 14827, 21708, 3801, 64698, 2179 or 13249 aberrancy, for example, a 15986, 2188, 20743, 9148, 9151, 9791, 44252, 14184, 42461, 8204, 7970, 25552, 21657, 26492, 2411, 15088, 1905, 28899, 63380, 33935, 10480, 12686, 25501, 17694, 15701, 53062, 49908, 21612, 38949, 6216, 46863, 9235, 2201, 6985, 9883, 12238, 18057, 21617, 39228, 49928, 54476, 62113, 64316, 12264, 32362, 58198, 2887, 3205, 8557, 9600, 9693, 44867, 53058, 55556, 57658, 2208, 10252, 10302, 14218, 33877, 10317, 10485, 25964, 14815, 1363, 1397, 14827, 21708, 3801, 64698, 2179 or 13249, 15986, 2188, 20743, 9148, 9151, 9791, 44252, 14184, 42461, 8204, 7970, 25552, 21657, 26492, 2411, 15088, 1905, 28899, 63380, 33935, 10480, 12686, 25501, 17694, 15701, 53062, 49908, 21612, 38949, 6216, 46863, 9235, 2201, 6985, 9883, 12238, 18057, 21617, 39228, 49928, 54476, 62113, 64316, 12264, 32362, 58198, 2887, 3205, 8557, 9600, 9693, 44867, 53058, 55556, 57658, 2208, 10252, 10302, 14218, 33877, 10317, 10485, 25964, 14815, 1363, 1397, 14827, 21708, 3801, 64698, 2179 or 13249 agonist or 15986, 2188, 20743, 9148, 9151, 9791, 44252, 14184, 42461, 8204, 7970, 25552, 21657, 26492, 2411, 15088, 1905, 28899, 63380, 33935, 10480, 12686, 25501, 17694, 15701, 53062, 49908, 21612, 38949, 6216, 46863, 9235, 2201, 6985, 9883, 12238, 18057, 21617, 39228, 49928, 54476, 62113, 64316, 12264, 32362, 58198, 2887, 3205, 8557, 9600, 9693, 44867, 53058, 55556, 57658, 2208, 10252, 10302, 14218, 33877, 10317, 10485, 25964, 14815, 1363, 1397, 14827, 21708, 3801, 64698, 2179 or 13249 antagonist agent can be used for treating the subject. The appropriate agent can be determined based on screening assays described herein.

[0933] Therapeutic Methods

[0934] Described herein are methods and compositions whereby a cancer may be ameliorated. Certain cancers are brought about, at least in part, by an excessive level of a gene product, or by the presence of a gene product exhibiting an abnormal or excessive activity. As such, the reduction in the level and/or activity of such gene products would bring about the amelioration of at least one symptom of a cancer. Techniques for the reduction of gene expression levels or the activity of a protein are discussed below.

[0935] Alternatively, certain other cancers are brought about, at least in part, by the absence or reduction of the level of gene expression, or a reduction in the level of a protein's activity. As such, an increase in the level of gene expression and/or the activity of such proteins would bring about the amelioration of at least one symptom of a cancer.

[0936] In some cases, the up-regulation of a gene in a disease state reflects a protective role for that gene product in responding to the disease condition. Enhancement of such a gene's expression, or the activity of the gene product, will reinforce the protective effect it exerts. Some cancerous disease states may result from an abnormally low level of activity of such a protective gene. In these cases also, an increase in the level of gene expression and/or the activity of such gene products would bring about the amelioration of a least one symptom of a cancer. Techniques for increasing target gene expression levels or target gene product activity levels are discussed herein.

[0937] Accordingly, another aspect of the invention pertains to methods of modulating 15986, 2188, 20743, 9148, 9151, 9791, 44252, 14184, 42461, 8204, 7970, 25552, 21657, 26492, 2411, 15088, 1905, 28899, 63380, 33935, 10480, 12686, 25501, 17694, 15701, 53062, 49908, 21612, 38949, 6216, 46863, 9235, 2201, 6985, 9883, 12238, 18057, 21617, 39228, 49928, 54476, 62113, 64316, 12264, 32362, 58198, 2887, 3205, 8557, 9600, 9693, 44867, 53058, 55556, 57658, 2208, 10252, 10302, 14218, 33877, 10317, 10485, 25964, 14815, 1363, 1397, 14827, 21708, 3801, 64698, 2179 or 13249 expression or activity for therapeutic purposes. Accordingly, in an exemplary embodiment, the modulatory method of the invention involves contacting a cell with a 15986, 2188, 20743, 9148, 9151, 9791, 44252, 14184, 42461, 8204, 7970, 25552, 21657, 26492, 2411, 15088, 1905, 28899, 63380, 33935, 10480, 12686, 25501, 17694, 15701, 53062, 49908, 21612, 38949, 6216, 46863, 9235, 2201, 6985, 9883, 12238, 18057, 21617, 39228, 49928, 54476, 62113, 64316, 12264, 32362, 58198, 2887, 3205, 8557, 9600, 9693, 44867, 53058, 55556, 57658, 2208, 10252, 10302, 14218, 33877, 10317, 10485, 25964, 14815, 1363, 1397, 14827, 21708, 3801, 64698, 2179 or 13249 or agent that modulates one or more of the activities of 15986, 2188, 20743, 9148, 9151, 9791, 44252, 14184, 42461, 8204, 7970, 25552, 21657, 26492, 2411, 15088, 1905, 28899, 63380, 33935, 10480, 12686, 25501, 17694, 15701, 53062, 49908, 21612, 38949, 6216, 46863, 9235, 2201, 6985, 9883, 12238, 18057, 21617, 39228, 49928, 54476, 62113, 64316, 12264, 32362, 58198, 2887, 3205, 8557, 9600, 9693, 44867, 53058, 55556, 57658, 2208, 10252, 10302, 14218, 33877, 10317, 10485, 25964, 14815, 1363, 1397, 14827, 21708, 3801, 64698, 2179 or 13249 protein activity associated with the cell (e.g., an endothelial cell, ovarian cell, bladder cell and prostate cell). An agent that modulates 15986, 2188, 20743, 9148, 9151, 9791, 44252, 14184, 42461, 8204, 7970, 25552, 21657, 26492, 2411, 15088, 1905, 28899, 63380, 33935, 10480, 12686, 25501, 17694, 15701, 53062, 49908, 21612, 38949, 6216, 46863, 9235, 2201, 6985, 9883, 12238, 18057, 21617, 39228, 49928, 54476, 62113, 64316, 12264, 32362, 58198, 2887, 3205, 8557, 9600, 9693, 44867, 53058, 55556, 57658, 2208, 10252, 10302, 14218, 33877, 10317, 10485, 25964, 14815, 1363, 1397, 14827, 21708, 3801, 64698, 2179 or 13249 protein activity can be an agent as described herein, such as a nucleic acid or a protein, a naturally-occurring target molecule of a 15986, 2188, 20743, 9148, 9151, 9791, 44252, 14184, 42461, 8204, 7970, 25552, 21657, 26492, 2411, 15088, 1905, 28899, 63380, 33935, 10480, 12686, 25501, 17694, 15701, 53062, 49908, 21612, 38949, 6216, 46863, 9235, 2201, 6985, 9883, 12238, 18057, 21617, 39228, 49928, 54476, 62113, 64316, 12264, 32362, 58198, 2887, 3205, 8557, 9600, 9693, 44867, 53058, 55556, 57658, 2208, 10252, 10302, 14218, 33877, 10317, 10485, 25964, 14815, 1363, 1397, 14827, 21708, 3801, 64698, 2179 or 13249 protein (e.g., a 15986, 2188, 20743, 9148, 9151, 9791, 44252, 14184, 42461, 8204, 7970, 25552, 21657, 26492, 2411, 15088, 1905, 28899, 63380, 33935, 10480, 12686, 25501, 17694, 15701, 53062, 49908, 21612, 38949, 6216, 46863, 9235, 2201, 6985, 9883, 12238, 18057, 21617, 39228, 49928, 54476, 62113, 64316, 12264, 32362, 58198, 2887, 3205, 8557, 9600, 9693, 44867, 53058, 55556, 57658, 2208, 10252, 10302, 14218, 33877, 10317, 10485, 25964, 14815, 1363, 1397, 14827, 21708, 3801, 64698, 2179 or 13249 ligand or substrate), a 15986, 2188, 20743, 9148, 9151, 9791, 44252, 14184, 42461, 8204, 7970, 25552, 21657, 26492, 2411, 15088, 1905, 28899, 63380, 33935, 10480, 12686, 25501, 17694, 15701, 53062, 49908, 21612, 38949, 6216, 46863, 9235, 2201, 6985, 9883, 12238, 18057, 21617, 39228, 49928, 54476, 62113, 64316, 12264, 32362, 58198, 2887, 3205, 8557, 9600, 9693, 44867, 53058, 55556, 57658, 2208, 10252, 10302, 14218, 33877, 10317, 10485, 25964, 14815, 1363, 1397, 14827, 21708, 3801, 64698, 2179 or 13249 antibody, a 15986, 2188, 20743, 9148, 9151, 9791, 44252, 14184, 42461, 8204, 7970, 25552, 21657, 26492, 2411, 15088, 1905, 28899, 63380, 33935, 10480, 12686, 25501, 17694, 15701, 53062, 49908, 21612, 38949, 6216, 46863, 9235, 2201, 6985, 9883, 12238, 18057, 21617, 39228, 49928, 54476, 62113, 64316, 12264, 32362, 58198, 2887, 3205, 8557, 9600, 9693, 44867, 53058, 55556, 57658, 2208, 10252, 10302, 14218, 33877, 10317, 10485, 25964, 14815, 1363, 1397, 14827, 21708, 3801, 64698, 2179 or 13249 agonist or antagonist, a peptidomimetic of a 15986, 2188, 20743, 9148, 9151, 9791, 44252, 14184, 42461, 8204, 7970, 25552, 21657, 26492, 2411, 15088, 1905, 28899, 63380, 33935, 10480, 12686, 25501, 17694, 15701, 53062, 49908, 21612, 38949, 6216, 46863, 9235, 2201, 6985, 9883, 12238, 18057, 21617, 39228, 49928, 54476, 62113, 64316, 12264, 32362, 58198, 2887, 3205, 8557, 9600, 9693, 44867, 53058, 55556, 57658, 2208, 10252, 10302, 14218, 33877, 10317, 10485, 25964, 14815, 1363, 1397, 14827, 21708, 3801, 64698, 2179 or 13249 agonist or antagonist, or other small molecule. In one embodiment, the agent stimulates one or more 15986, 2188, 20743, 9148, 9151, 9791, 44252, 14184, 42461, 8204, 7970, 25552, 21657, 26492, 2411, 15088, 1905, 28899, 63380, 33935, 10480, 12686, 25501, 17694, 15701, 53062, 49908, 21612, 38949, 6216, 46863, 9235, 2201, 6985, 9883, 12238, 18057, 21617, 39228, 49928, 54476, 62113, 64316, 12264, 32362, 58198, 2887, 3205, 8557, 9600, 9693, 44867, 53058, 55556, 57658, 2208, 10252, 10302, 14218, 33877, 10317, 10485, 25964, 14815, 1363, 1397, 14827, 21708, 3801, 64698, 2179 or 13249 activities. Examples of such stimulatory agents include active 15986, 2188, 20743, 9148, 9151, 9791, 44252, 14184, 42461, 8204, 7970, 25552, 21657, 26492, 2411, 15088, 1905, 28899, 63380, 33935, 10480, 12686, 25501, 17694, 15701, 53062, 49908, 21612, 38949, 6216, 46863, 9235, 2201, 6985, 9883, 12238, 18057, 21617, 39228, 49928, 54476, 62113, 64316, 12264, 32362, 58198, 2887, 3205, 8557, 9600, 9693, 44867, 53058, 55556, 57658, 2208, 10252, 10302, 14218, 33877, 10317, 10485, 25964, 14815, 1363, 1397, 14827, 21708, 3801, 64698, 2179 or 13249 protein and a nucleic acid molecule encoding 15986, 2188, 20743, 9148, 9151, 9791, 44252, 14184, 42461, 8204, 7970, 25552, 21657, 26492, 2411, 15088, 1905, 28899, 63380, 33935, 10480, 12686, 25501, 17694, 15701, 53062, 49908, 21612, 38949, 6216, 46863, 9235, 2201, 6985, 9883, 12238, 18057, 21617, 39228, 49928, 54476, 62113, 64316, 12264, 32362, 58198, 2887, 3205, 8557, 9600, 9693, 44867, 53058, 55556, 57658, 2208, 10252, 10302, 14218, 33877, 10317, 10485, 25964, 14815, 1363, 1397, 14827, 21708, 3801, 64698, 2179 or 13249 that has been introduced into the cell. In another embodiment, the agent inhibits one or more 15986, 2188, 20743, 9148, 9151, 9791, 44252, 14184, 42461, 8204, 7970, 25552, 21657, 26492, 2411, 15088, 1905, 28899, 63380, 33935, 10480, 12686, 25501, 17694, 15701, 53062, 49908, 21612, 38949, 6216, 46863, 9235, 2201, 6985, 9883, 12238, 18057, 21617, 39228, 49928, 54476, 62113, 64316, 12264, 32362, 58198, 2887, 3205, 8557, 9600, 9693, 44867, 53058, 55556, 57658, 2208, 10252, 10302, 14218, 33877, 10317, 10485, 25964, 14815, 1363, 1397, 14827, 21708, 3801, 64698, 2179 or 13249 activities. Examples of such inhibitory agents include antisense 15986, 2188, 20743, 9148, 9151, 9791, 44252, 14184, 42461, 8204, 7970, 25552, 21657, 26492, 2411, 15088, 1905, 28899, 63380, 33935, 10480, 12686, 25501, 17694, 15701, 53062, 49908, 21612, 38949, 6216, 46863, 9235, 2201, 6985, 9883, 12238, 18057, 21617, 39228, 49928, 54476, 62113, 64316, 12264, 32362, 58198, 2887, 3205, 8557, 9600, 9693, 44867, 53058, 55556, 57658, 2208, 10252, 10302, 14218, 33877, 10317, 10485, 25964, 14815, 1363, 1397, 14827, 21708, 3801, 64698, 2179 or 13249 nucleic acid molecules, anti-15986, 2188, 20743, 9148, 9151, 9791, 44252, 14184, 42461, 8204, 7970, 25552, 21657, 26492, 2411, 15088, 1905, 28899, 63380, 33935, 10480, 12686, 25501, 17694, 15701, 53062, 49908, 21612, 38949, 6216, 46863, 9235, 2201, 6985, 9883, 12238, 18057, 21617, 39228, 49928, 54476, 62113, 64316, 12264, 32362, 58198, 2887, 3205, 8557, 9600, 9693, 44867, 53058, 55556, 57658, 2208, 10252, 10302, 14218, 33877, 10317, 10485, 25964, 14815, 1363, 1397, 14827, 21708, 3801, 64698, 2179 or 13249 antibodies, and 15986, 2188, 20743, 9148, 9151, 9791, 44252, 14184, 42461, 8204, 7970, 25552, 21657, 26492, 2411, 15088, 1905, 28899, 63380, 33935, 10480, 12686, 25501, 17694, 15701, 53062, 49908, 21612, 38949, 6216, 46863, 9235, 2201, 6985, 9883, 12238, 18057, 21617, 39228, 49928, 54476, 62113, 64316, 12264, 32362, 58198, 2887, 3205, 8557, 9600, 9693, 44867, 53058, 55556, 57658, 2208, 10252, 10302, 14218, 33877, 10317, 10485, 25964, 14815, 1363, 1397, 14827, 21708, 3801, 64698, 2179 or 13249 inhibitors. These modulatory methods can be performed in vitro (e.g., by culturing the cell with the agent) or, alternatively, in vivo (e.g., by administering the agent to a subject). As such, the present invention provides methods of treating an individual afflicted with a disease or disorder characterized by aberrant or unwanted expression or activity of a 15986, 2188, 20743, 9148, 9151, 9791, 44252, 14184, 42461, 8204, 7970, 25552, 21657, 26492, 2411, 15088, 1905, 28899, 63380, 33935, 10480, 12686, 25501, 17694, 15701, 53062, 49908, 21612, 38949, 6216, 46863, 9235, 2201, 6985, 9883, 12238, 18057, 21617, 39228, 49928, 54476, 62113, 64316, 12264, 32362, 58198, 2887, 3205, 8557, 9600, 9693, 44867, 53058, 55556, 57658, 2208, 10252, 10302, 14218, 33877, 10317, 10485, 25964, 14815, 1363, 1397, 14827, 21708, 3801, 64698, 2179 or 13249 protein or nucleic acid molecule. In one embodiment, the method involves administering an agent (e.g., an agent identified by a screening assay described herein), or combination of agents that modulates (e.g., upregulates or downregulates) 15986, 2188, 20743, 9148, 9151, 9791, 44252, 14184, 42461, 8204, 7970, 25552, 21657, 26492, 2411, 15088, 1905, 28899, 63380, 33935, 10480, 12686, 25501, 17694, 15701, 53062, 49908, 21612, 38949, 6216, 46863, 9235, 2201, 6985, 9883, 12238, 18057, 21617, 39228, 49928, 54476, 62113, 64316, 12264, 32362, 58198, 2887, 3205, 8557, 9600, 9693, 44867, 53058, 55556, 57658, 2208, 10252, 10302, 14218, 33877, 10317, 10485, 25964, 14815, 1363, 1397, 14827, 21708, 3801, 64698, 2179 or 13249 expression or activity. In another embodiment, the method involves administering a 15986, 2188, 20743, 9148, 9151, 9791, 44252, 14184, 42461, 8204, 7970, 25552, 21657, 26492, 2411, 15088, 1905, 28899, 63380, 33935, 10480, 12686, 25501, 17694, 15701, 53062, 49908, 21612, 38949, 6216, 46863, 9235, 2201, 6985, 9883, 12238, 18057, 21617, 39228, 49928, 54476, 62113, 64316, 12264, 32362, 58198, 2887, 3205, 8557, 9600, 9693, 44867, 53058, 55556, 57658, 2208, 10252, 10302, 14218, 33877, 10317, 10485, 25964, 14815, 1363, 1397, 14827, 21708, 3801, 64698, 2179 or 13249 protein or nucleic acid molecule as therapy to compensate for reduced, aberrant, or unwanted 15986, 2188, 20743, 9148, 9151, 9791, 44252, 14184, 42461, 8204, 7970, 25552, 21657, 26492, 2411, 15088, 1905, 28899, 63380, 33935, 10480, 12686, 25501, 17694, 15701, 53062, 49908, 21612, 38949, 6216, 46863, 9235, 2201, 6985, 9883, 12238, 18057, 21617, 39228, 49928, 54476, 62113, 64316, 12264, 32362, 58198, 2887, 3205, 8557, 9600, 9693, 44867, 53058, 55556, 57658, 2208, 10252, 10302, 14218, 33877, 10317, 10485, 25964, 14815, 1363, 1397, 14827, 21708, 3801, 64698, 2179 or 13249 expression or activity.

[0938] Stimulation of 15986, 2188, 20743, 9148, 9151, 9791, 44252, 14184, 42461, 8204, 7970, 25552, 21657, 26492, 2411, 15088, 1905, 28899, 63380, 33935, 10480, 12686, 25501, 17694, 15701, 53062, 49908, 21612, 38949, 6216, 46863, 9235, 2201, 6985, 9883, 12238, 18057, 21617, 39228, 49928, 54476, 62113, 64316, 12264, 32362, 58198, 2887, 3205, 8557, 9600, 9693, 44867, 53058, 55556, 57658, 2208, 10252, 10302, 14218, 33877, 10317, 10485, 25964, 14815, 1363, 1397, 14827, 21708, 3801, 64698, 2179 or 13249 activity is desirable in situations in which 15986, 2188, 20743, 9148, 9151, 9791, 44252, 14184, 42461, 8204, 7970, 25552, 21657, 26492, 2411, 15088, 1905, 28899, 63380, 33935, 10480, 12686, 25501, 17694, 15701, 53062, 49908, 21612, 38949, 6216, 46863, 9235, 2201, 6985, 9883, 12238, 18057, 21617, 39228, 49928, 54476, 62113, 64316, 12264, 32362, 58198, 2887, 3205, 8557, 9600, 9693, 44867, 53058, 55556, 57658, 2208, 10252, 10302, 14218, 33877, 10317, 10485, 25964, 14815, 1363, 1397, 14827, 21708, 3801, 64698, 2179 or 13249 is abnormally downregulated and/or in which increased 15986, 2188, 20743, 9148, 9151, 9791, 44252, 14184, 42461, 8204, 7970, 25552, 21657, 26492, 2411, 15088, 1905, 28899, 63380, 33935, 10480, 12686, 25501, 17694, 15701, 53062, 49908, 21612, 38949, 6216, 46863, 9235, 2201, 6985, 9883, 12238, 18057, 21617, 39228, 49928, 54476, 62113, 64316, 12264, 32362, 58198, 2887, 3205, 8557, 9600, 9693, 44867, 53058, 55556, 57658, 2208, 10252, 10302, 14218, 33877; 10317, 10485, 25964, 14815, 1363, 1397, 14827, 21708, 3801, 64698, 2179 or 13249 activity is likely to have a beneficial effect. Likewise, inhibition of 15986, 2188, 20743, 9148, 9151, 9791, 44252, 14184, 42461, 8204, 7970, 25552, 21657, 26492, 2411, 15088, 1905, 28899, 63380, 33935, 10480, 12686, 25501, 17694, 15701, 53062, 49908, 21612, 38949, 6216, 46863, 9235, 2201, 6985, 9883, 12238, 18057, 21617, 39228, 49928, 54476, 62113, 64316, 12264, 32362, 58198, 2887, 3205, 8557, 9600, 9693, 44867, 53058, 55556, 57658, 2208, 10252, 10302, 14218, 33877, 10317, 10485, 25964, 14815, 1363, 1397, 14827, 21708, 3801, 64698, 2179 or 13249 activity is desirable in situations in which 15986, 2188, 20743, 9148, 9151, 9791, 44252, 14184, 42461, 8204, 7970, 25552, 21657, 26492, 2411, 15088, 1905, 28899, 63380, 33935, 10480, 12686, 25501, 17694, 15701, 53062, 49908, 21612, 38949, 6216, 46863, 9235, 2201, 6985, 9883, 12238, 18057, 21617, 39228, 49928, 54476, 62113, 64316, 12264, 32362, 58198, 2887, 3205, 8557, 9600, 9693, 44867, 53058, 55556, 57658, 2208, 10252, 10302, 14218, 33877, 10317, 10485, 25964, 14815, 1363, 1397, 14827, 21708, 3801, 64698, 2179 or 13249 is abnormally upregulated and/or in which decreased 15986, 2188, 20743, 9148, 9151, 9791, 44252, 14184, 42461, 8204, 7970, 25552, 21657, 26492, 2411, 15088, 1905, 28899, 63380, 33935, 10480, 12686, 25501, 17694, 15701, 53062, 49908, 21612, 38949, 6216, 46863, 9235, 2201, 6985, 9883, 12238, 18057, 21617, 39228, 49928, 54476, 62113, 64316, 12264, 32362, 58198, 2887, 3205, 8557, 9600, 9693, 44867, 53058, 55556, 57658, 2208, 10252, 10302, 14218, 33877, 10317, 10485, 25964, 14815, 1363, 1397, 14827, 21708, 3801, 64698, 2179 or 13249 activity is likely to have a beneficial effect.

[0939] Methods for Inhibiting Target Gene Expression, Synthesis, or Activity

[0940] As discussed above, genes involved in cancer may cause such disorders via an increased level of gene activity. In some cases, such up-regulation may have a causative or exacerbating effect on the disease state. A variety of techniques may be used to inhibit the expression, synthesis, or activity of such genes and/or proteins.

[0941] For example, compounds such as those identified through assays described above, which exhibit inhibitory activity, may be used in accordance with the invention to ameliorate at least one symptom of a cancer. Such molecules may include, but are not limited to, small organic molecules, peptides, antibodies, and the like.

[0942] For example, compounds can be administered that compete with endogenous ligand for the 15986, 2188, 20743, 9148, 9151, 9791, 44252, 14184, 42461, 8204, 7970, 25552, 21657, 26492, 2411, 15088, 1905, 28899, 63380, 33935, 10480, 12686, 25501, 17694, 15701, 53062, 49908, 21612, 38949, 6216, 46863, 9235, 2201, 6985, 9883, 12238, 18057, 21617, 39228, 49928, 54476, 62113, 64316, 12264, 32362, 58198, 2887, 3205, 8557, 9600, 9693, 44867, 53058, 55556, 57658, 2208, 10252, 10302, 14218, 33877, 10317, 10485, 25964, 14815, 1363, 1397, 14827, 21708, 3801, 64698, 2179 or 13249 protein. The resulting reduction in the amount of ligand-bound 15986, 2188, 20743, 9148, 9151, 9791, 44252, 14184, 42461, 8204, 7970, 25552, 21657, 26492, 2411, 15088, 1905, 28899, 63380, 33935, 10480, 12686, 25501, 17694, 15701, 53062, 49908, 21612, 38949, 6216, 46863, 9235, 2201, 6985, 9883, 12238, 18057, 21617, 39228, 49928, 54476, 62113, 64316, 12264, 32362, 58198, 2887, 3205, 8557, 9600, 9693, 44867, 53058, 55556, 57658, 2208, 10252, 10302, 14218, 33877, 10317, 10485, 25964, 14815, 1363, 1397, 14827, 21708, 3801, 64698, 2179 or 13249 protein will modulate endothelial cell physiology. Compounds that can be particularly useful for this purpose include, for example, soluble proteins or peptides, such as peptides comprising one or more of the extracellular domains, or portions and/or analogs thereof, of the 15986, 2188, 20743, 9148, 9151, 9791, 44252, 14184, 42461, 8204, 7970, 25552, 21657, 26492, 2411, 15088, 1905, 28899, 63380, 33935, 10480, 12686, 25501, 17694, 15701, 53062, 49908, 21612, 38949, 6216, 46863, 9235, 2201, 6985, 9883, 12238, 18057, 21617, 39228, 49928, 54476, 62113, 64316, 12264, 32362, 58198, 2887, 3205, 8557, 9600, 9693, 44867, 53058, 55556, 57658, 2208, 10252, 10302, 14218, 33877, 10317, 10485, 25964, 14815, 1363, 1397, 14827, 21708, 3801, 64698, 2179 or 13249 protein, including, for example, soluble fusion proteins such as Ig-tailed fusion proteins. (For a discussion of the production of Ig-tailed fusion proteins, see, for example, U.S. Pat. No. 5,116,964). Alternatively, compounds, such as ligand analogs or antibodies, that bind to the 15986, 2188, 20743, 9148, 9151, 9791, 44252, 14184, 42461, 8204, 7970, 25552, 21657, 26492, 2411, 15088, 1905, 28899, 63380, 33935, 10480, 12686, 25501, 17694, 15701, 53062, 49908, 21612, 38949, 6216, 46863, 9235, 2201, 6985, 9883, 12238, 18057, 21617, 39228, 49928, 54476, 62113, 64316, 12264, 32362, 58198, 2887, 3205, 8557, 9600, 9693, 44867, 53058, 55556, 57658, 2208, 10252, 10302, 14218, 33877, 10317, 10485, 25964, 14815, 1363, 1397, 14827, 21708, 3801, 64698, 2179 or 13249 receptor site, but do not activate the protein, (e.g., receptor-ligand antagonists) can be effective in inhibiting 15986, 2188, 20743, 9148, 9151, 9791, 44252, 14184, 42461, 8204, 7970, 25552, 21657, 26492, 2411, 15088, 1905, 28899, 63380, 33935, 10480, 12686, 25501, 17694, 15701, 53062, 49908, 21612, 38949, 6216, 46863, 9235, 2201, 6985, 9883, 12238, 18057, 21617, 39228, 49928, 54476, 62113, 64316, 12264, 32362, 58198, 2887, 3205, 8557, 9600, 9693, 44867, 53058, 55556, 57658, 2208, 10252, 10302, 14218, 33877, 10317, 10485, 25964, 14815, 1363, 1397, 14827, 21708, 3801, 64698, 2179 or 13249 protein activity.

[0943] Further, antisense and ribozyme molecules which inhibit expression of the 15986, 2188, 20743, 9148, 9151, 9791, 44252, 14184, 42461, 8204, 7970, 25552, 21657, 26492, 2411, 15088, 1905, 28899, 63380, 33935, 10480, 12686, 25501, 17694, 15701, 53062, 49908, 21612, 38949, 6216, 46863, 9235, 2201, 6985, 9883, 12238, 18057, 21617, 39228, 49928, 54476, 62113, 64316, 12264, 32362, 58198, 2887, 3205, 8557, 9600, 9693, 44867, 53058, 55556, 57658, 2208, 10252, 10302, 14218, 33877, 10317, 10485, 25964, 14815, 1363, 1397, 14827, 21708, 3801, 64698, 2179 or 13249 gene may also be used in accordance with the invention to inhibit aberrant 15986, 2188, 20743, 9148, 9151, 9791, 44252, 14184, 42461, 8204, 7970, 25552, 21657, 26492, 2411, 15088, 1905, 28899, 63380, 33935, 10480, 12686, 25501, 17694, 15701, 53062, 49908, 21612, 38949, 6216, 46863, 9235, 2201, 6985, 9883, 12238, 18057, 21617, 39228, 49928, 54476, 62113, 64316, 12264, 32362, 58198, 2887, 3205, 8557, 9600, 9693, 44867, 53058, 55556, 57658, 2208, 10252, 10302, 14218, 33877, 10317, 10485, 25964, 14815, 1363, 1397, 14827, 21708, 3801, 64698, 2179 or 13249 gene activity. Still further, triple helix molecules may be utilized in inhibiting aberrant 15986, 2188, 20743, 9148, 9151, 9791, 44252, 14184, 42461, 8204, 7970, 25552, 21657, 26492, 2411, 15088, 1905, 28899, 63380, 33935, 10480, 12686, 25501, 17694, 15701, 53062, 49908, 21612, 38949, 6216, 46863, 9235, 2201, 6985, 9883, 12238, 18057, 21617, 39228, 49928, 54476, 62113, 64316, 12264, 32362, 58198, 2887, 3205, 8557, 9600, 9693, 44867, 53058, 55556, 57658, 2208, 10252, 10302, 14218, 33877, 10317, 10485, 25964, 14815, 1363, 1397, 14827, 21708, 3801, 64698, 2179 or 13249 gene activity.

[0944] The antisense nucleic acid molecules used in the methods of the invention are typically administered to a subject or generated in situ such that they hybridize with or bind to cellular mRNA and/or genomic DNA encoding a 15986, 2188, 20743, 9148, 9151, 9791, 44252, 14184, 42461, 8204, 7970, 25552, 21657, 26492, 2411, 15088, 1905, 28899, 63380, 33935, 10480, 12686, 25501, 17694, 15701, 53062, 49908, 21612, 38949, 6216, 46863, 9235, 2201, 6985, 9883, 12238, 18057, 21617, 39228, 49928, 54476, 62113, 64316, 12264, 32362, 58198, 2887, 3205, 8557, 9600, 9693, 44867, 53058, 55556, 57658, 2208, 10252, 10302, 14218, 33877, 10317, 10485, 25964, 14815, 1363, 1397, 14827, 21708, 3801, 64698, 2179 or 13249 protein to thereby inhibit expression of the protein, e.g., by inhibiting transcription and/or translation. The hybridization can be by conventional nucleotide complementarity to form a stable duplex, or, for example, in the case of an antisense nucleic acid molecule which binds to DNA duplexes, through specific interactions in the major groove of the double helix. An example of a route of administration of antisense nucleic acid molecules of the invention include direct injection at a tissue site. Alternatively, antisense nucleic acid molecules can be modified to target selected cells and then administered systemically. For example, for systemic administration, antisense molecules can be modified such that they specifically bind to receptors or antigens expressed on a selected cell surface, e.g., by linking the antisense nucleic acid molecules to peptides or antibodies which bind to cell surface receptors or antigens. The antisense nucleic acid molecules can also be delivered to cells using the vectors described herein. To achieve sufficient intracellular concentrations of the antisense molecules, vector constructs in which the antisense nucleic acid molecule is placed under the control of a strong pol II or pol III promoter are preferred.

[0945] In yet another embodiment, an antisense nucleic acid molecule used in the methods of the invention is an α-anomeric nucleic acid molecule. An α-anomeric nucleic acid molecule forms specific double-stranded hybrids with complementary RNA in which, contrary to the usual β-units, the strands run parallel to each other (Gaultier et al. (1987) Nucleic Acids. Res. 15:6625-6641). The antisense nucleic acid molecule can also comprise a 2′-o-methylribonucleotide (Inoue et al. (1987) Nucleic Acids Res. 15:6131-6148) or a chimeric RNA-DNA analogue (Inoue et al. (1987) FEBS Lett. 215:327-330).

[0946] In still another embodiment, an antisense nucleic acid used in the methods of the invention is a ribozyme. Ribozymes are catalytic RNA molecules with ribonuclease activity which are capable of cleaving a single-stranded nucleic acid, such as an mRNA, to which they have a complementary region. Thus, ribozymes (e.g., hammerhead ribozymes (described in Haselhoff and Gerlach (1988) Nature 334:585-591)) can be used to catalytically cleave 15986, 2188, 20743, 9148, 9151, 9791, 44252, 14184, 42461, 8204, 7970, 25552, 21657, 26492, 2411, 15088, 1905, 28899, 63380, 33935, 10480, 12686, 25501, 17694, 15701, 53062, 49908, 21612, 38949, 6216, 46863, 9235, 2201, 6985, 9883, 12238, 18057, 21617, 39228, 49928, 54476, 62113, 64316, 12264, 32362, 58198, 2887, 3205, 8557, 9600, 9693, 44867, 53058, 55556, 57658, 2208, 10252, 10302, 14218, 33877, 10317, 10485, 25964, 14815, 1363, 1397, 14827, 21708, 3801, 64698, 2179 or 13249 mRNA transcripts to thereby inhibit translation of 15986, 2188, 20743, 9148, 9151, 9791, 44252, 14184, 42461, 8204, 7970, 25552, 21657, 26492, 2411, 15088, 1905, 28899, 63380, 33935, 10480, 12686, 25501, 17694, 15701, 53062, 49908, 21612, 38949, 6216, 46863, 9235, 2201, 6985, 9883, 12238, 18057, 21617, 39228, 49928, 54476, 62113, 64316, 12264, 32362, 58198, 2887, 3205, 8557, 9600, 9693, 44867, 53058, 55556, 57658, 2208, 10252, 10302, 14218, 33877, 10317, 10485, 25964, 14815, 1363, 1397, 14827, 21708, 3801, 64698, 2179 or 13249 mRNA. A ribozyme having specificity for a 32457-encoding nucleic acid can be designed based upon the nucleotide sequence of a 15986, 2188, 20743, 9148, 9151, 9791, 44252, 14184, 42461, 8204, 7970, 25552, 21657, 26492, 2411, 15088, 1905, 28899, 63380, 33935, 10480, 12686, 25501, 17694, 15701, 53062, 49908, 21612, 38949, 6216, 46863, 9235, 2201, 6985, 9883, 12238, 18057, 21617, 39228, 49928, 54476, 62113, 64316, 12264, 32362, 58198, 2887, 3205, 8557, 9600, 9693, 44867, 53058, 55556, 57658, 2208, 10252, 10302, 14218, 33877, 10317, 10485, 25964, 14815, 1363, 1397, 14827, 21708, 3801, 64698, 2179 or 13249 cDNA disclosed herein (i.e., SEQ ID NO:1, 3, 5, 7, 9, 11, 13, 15, 17, 19, 21, 23, 25, 27, 29, 31, 33, 35, 37, 39, 41, 43, 45, 47, 49, 51, 53, 55, 57, 59, 61, 63, 65, 67, 69, 71, 73, 75, 77, 79, 81, 83, 85, 87, 89, 91, 93, 95, 97, 99, 101, 103, 105, 107, 109, 111, 113, 115, 117, 119, 121, 123, 125, 127, 129, 131, 133, 135, 137, 139, 141 or 143). For example, a derivative of a Tetrahymena L-19 IVS RNA can be constructed in which the nucleotide sequence of the active site is complementary to the nucleotide sequence to be cleaved in a, 15986, 2188, 20743, 9148, 9151, 9791, 44252, 14184, 42461, 8204, 7970, 25552, 21657, 26492, 2411, 15088, 1905, 28899, 63380, 33935, 10480, 12686, 25501, 17694, 15701, 53062, 49908, 21612, 38949, 6216, 46863, 9235, 2201, 6985, 9883, 12238, 18057, 21617, 39228, 49928, 54476, 62113, 64316, 12264, 32362, 58198, 2887, 3205, 8557, 9600, 9693, 44867, 53058, 55556, 57658, 2208, 10252, 10302, 14218, 33877, 10317, 10485, 25964, 14815, 1363, 1397, 14827, 21708, 3801, 64698, 2179 or 13249-encoding mRNA (see, for example, Cech et al. U.S. Pat. No. 4,987,071; and Cech et al. U.S. Pat. No. 5,116,742). Alternatively, 15986, 2188, 20743, 9148, 9151, 9791, 44252, 14184, 42461, 8204, 7970, 25552, 21657, 26492, 2411, 15088, 1905, 28899, 63380, 33935, 10480, 12686, 25501, 17694, 15701, 53062, 49908, 21612, 38949, 6216, 46863, 9235, 2201, 6985, 9883, 12238, 18057, 21617, 39228, 49928, 54476, 62113, 64316, 12264, 32362, 58198, 2887, 3205, 8557, 9600, 9693, 44867, 53058, 55556, 57658, 2208, 10252, 10302, 14218, 33877, 10317, 10485, 25964, 14815, 1363, 1397, 14827, 21708, 3801, 64698, 2179 or 13249 mRNA can be used to select a catalytic RNA having a specific ribonuclease activity from a pool of RNA molecules (see, for example, Bartel, D. and Szostak, J. W. (1993) Science 261:1411-1418).

[0947] 15986, 2188, 20743, 9148, 9151, 9791, 44252, 14184, 42461, 8204, 7970, 25552, 21657, 26492, 2411, 15088, 1905, 28899, 63380, 33935, 10480, 12686, 25501, 17694, 15701, 53062, 49908, 21612, 38949, 6216, 46863, 9235, 2201, 6985, 9883, 12238, 18057, 21617, 39228, 49928, 54476, 62113, 64316, 12264, 32362, 58198, 2887, 3205, 8557, 9600, 9693, 44867, 53058, 55556, 57658, 2208, 10252, 10302, 14218, 33877, 10317, 10485, 25964, 14815, 1363, 1397, 14827, 21708, 3801, 64698, 2179 or 13249 gene expression can also be inhibited by targeting nucleotide sequences complementary to the regulatory region of the 15986, 2188, 20743, 9148, 9151, 9791, 44252, 14184, 42461, 8204, 7970, 25552, 21657, 26492, 2411, 15088, 1905, 28899, 63380, 33935, 10480, 12686, 25501, 17694, 15701, 53062, 49908, 21612, 38949, 6216, 46863, 9235, 2201, 6985, 9883, 12238, 18057, 21617, 39228, 49928, 54476, 62113, 64316, 12264, 32362, 58198, 2887, 3205, 8557, 9600, 9693, 44867, 53058, 55556, 57658, 2208, 10252, 10302, 14218, 33877, 10317, 10485, 25964, 14815, 1363, 1397, 14827, 21708, 3801, 64698, 2179 or 13249 (e.g., the 15986, 2188, 20743, 9148, 9151, 9791, 44252, 14184, 42461, 8204, 7970, 25552, 21657, 26492, 2411, 15088, 1905, 28899, 63380, 33935, 10480, 12686, 25501, 17694, 15701, 53062, 49908, 21612, 38949, 6216, 46863, 9235, 2201, 6985, 9883, 12238, 18057, 21617, 39228, 49928, 54476, 62113, 64316, 12264, 32362, 58198, 2887, 3205, 8557, 9600, 9693, 44867, 53058, 55556, 57658, 2208, 10252, 10302, 14218, 33877, 10317, 10485, 25964, 14815, 1363, 1397, 14827, 21708, 3801, 64698, 2179 or 13249 promoter and/or enhancers) to form triple helical structures that prevent transcription of the 15986, 2188, 20743, 9148, 9151, 9791, 44252, 14184, 42461, 8204, 7970, 25552, 21657, 26492, 2411, 15088, 1905, 28899, 63380, 33935, 10480, 12686, 25501, 17694, 15701, 53062, 49908, 21612, 38949, 6216, 46863, 9235, 2201, 6985, 9883, 12238, 18057, 21617, 39228, 49928, 54476, 62113, 64316, 12264, 32362, 58198, 2887, 3205, 8557, 9600, 9693, 44867, 53058, 55556, 57658, 2208, 10252, 10302, 14218, 33877, 10317, 10485, 25964, 14815, 1363, 1397, 14827, 21708, 3801, 64698, 2179 or 13249 gene in target cells (see, for example, Helene, C. (1991) Anticancer Drug Des. 6(6):569-84; Helene, C. et al. (1992) Ann. N.Y. Acad. Sci. 660:27-36; and Maher, L. J. (1992) Bioassays 14(12):807-15).

[0948] Antibodies that are both specific for the 15986, 2188, 20743, 9148, 9151, 9791, 44252, 14184, 42461, 8204, 7970, 25552, 21657, 26492, 2411, 15088, 1905, 28899, 63380, 33935, 10480, 12686, 25501, 17694, 15701, 53062, 49908, 21612, 38949, 6216, 46863, 9235, 2201, 6985, 9883, 12238, 18057, 21617, 39228, 49928, 54476, 62113, 64316, 12264, 32362, 58198, 2887, 3205, 8557, 9600, 9693, 44867, 53058, 55556, 57658, 2208, 10252, 10302, 14218, 33877, 10317, 10485, 25964, 14815, 1363, 1397, 14827, 21708, 3801, 64698, 2179 or 13249 protein and interfere with its activity may also be used to modulate or inhibit 15986, 2188, 20743, 9148, 9151, 9791, 44252, 14184, 42461, 8204, 7970, 25552, 21657, 26492, 2411, 15088, 1905, 28899, 63380, 33935, 10480, 12686, 25501, 17694, 15701, 53062, 49908, 21612, 38949, 6216, 46863, 9235, 2201, 6985, 9883, 12238, 18057, 21617, 39228, 49928, 54476, 62113, 64316, 12264, 32362, 58198, 2887, 3205, 8557, 9600, 9693, 44867, 53058, 55556, 57658, 2208, 10252, 10302, 14218, 33877, 10317, 10485, 25964, 14815, 1363, 1397, 14827, 21708, 3801, 64698, 2179 or 13249 protein function. Such antibodies may be generated using standard techniques described herein, against the 15986, 2188, 20743, 9148, 9151, 9791, 44252, 14184, 42461, 8204, 7970, 25552, 21657, 26492, 2411, 15088, 1905, 28899, 63380, 33935, 10480, 12686, 25501, 17694, 15701, 53062, 49908, 21612, 38949, 6216, 46863, 9235, 2201, 6985, 9883, 12238, 18057, 21617, 39228, 49928, 54476, 62113, 64316, 12264, 32362, 58198, 2887, 3205, 8557, 9600, 9693, 44867, 53058, 55556, 57658, 2208, 10252, 10302, 14218, 33877, 10317, 10485, 25964, 14815, 1363, 1397, 14827, 21708, 3801, 64698, 2179 or 13249 protein itself or against peptides corresponding to portions of the protein. Such antibodies include but are not limited to polyclonal, monoclonal, Fab fragments, single chain antibodies, or chimeric antibodies.

[0949] In instances where the target gene protein is intracellular and whole antibodies are used, internalizing antibodies may be preferred. Lipofectin liposomes may be used to deliver the antibody or a fragment of the Fab region which binds to the target epitope into cells. Where fragments of the antibody are used, the smallest inhibitory fragment which binds to the target protein's binding domain is preferred. For example, peptides having an amino acid sequence corresponding to the domain of the variable region of the antibody that binds to the target gene protein may be used. Such peptides may be synthesized chemically or produced via recombinant DNA technology using methods well known in the art (described in, for example, Creighton (1983), supra; and Sambrook et al. (1989) supra). Single chain neutralizing antibodies which bind to intracellular target gene epitopes may also be administered. Such single chain antibodies may be administered, for example, by expressing nucleotide sequences encoding single-chain antibodies within the target cell population by utilizing, for example, techniques such as those described in Marasco et al. (1993) Proc. Natl. Acad. Sci. USA 90:7889-7893).

[0950] In some instances, the target gene protein is extracellular, or is a transmembrane protein, such as the 15986, 2188, 20743, 9148, 9151, 9791, 44252, 14184, 42461, 8204, 7970, 25552, 21657, 26492, 2411, 15088, 1905, 28899, 63380, 33935, 10480, 12686, 25501, 17694, 15701, 53062, 49908, 21612, 38949, 6216, 46863, 9235, 2201, 6985, 9883, 12238, 18057, 21617, 39228, 49928, 54476, 62113, 64316, 12264, 32362, 58198, 2887, 3205, 8557, 9600, 9693, 44867, 53058, 55556, 57658, 2208, 10252, 10302, 14218, 33877, 10317, 10485, 25964, 14815, 1363, 1397, 14827, 21708, 3801, 64698, 2179 or 13249 protein. Antibodies that are specific for one or more extracellular domains of the 15986, 2188, 20743, 9148, 9151, 9791, 44252, 14184, 42461, 8204, 7970, 25552, 21657, 26492, 2411, 15088, 1905, 28899, 63380, 33935, 10480, 12686, 25501, 17694, 15701, 53062, 49908, 21612, 38949, 6216, 46863, 9235, 2201, 6985, 9883, 12238, 18057, 21617, 39228, 49928, 54476, 62113, 64316, 12264, 32362, 58198, 2887, 3205, 8557, 9600, 9693, 44867, 53058, 55556, 57658, 2208, 10252, 10302, 14218, 33877, 10317, 10485, 25964, 14815, 1363, 1397, 14827, 21708, 3801, 64698, 2179 or 13249 protein, for example, and that interfere with its activity, are particularly useful in treating cancer or a cancer. Such antibodies are especially efficient because they can access the target domains directly from the bloodstream. Any of the administration techniques described below which are appropriate for peptide administration may be utilized to effectively administer inhibitory target gene antibodies to their site of action.

[0951] Methods for Restoring or Enhancing Target Gene Activity

[0952] Genes that cause a cancer may be underexpressed within the cancer. Alternatively, the activity of the protein products of such genes may be decreased, leading to the development of cancer. Such down-regulation of gene expression or decrease of protein activity might have a causative or exacerbating effect on the disease state.

[0953] In some cases, genes that are up-regulated in the disease state might be exerting a protective effect. A variety of techniques may be used to increase the expression, synthesis, or activity of genes and/or proteins that exert a protective effect in response to a cancer.

[0954] Described in this section are methods whereby the level of 15986, 2188, 20743, 9148, 9151, 9791, 44252, 14184, 42461, 8204, 7970, 25552, 21657, 26492, 2411, 15088, 1905, 28899, 63380, 33935, 10480, 12686, 25501, 17694, 15701, 53062, 49908, 21612, 38949, 6216, 46863, 9235, 2201, 6985, 9883, 12238, 18057, 21617, 39228, 49928, 54476, 62113, 64316, 12264, 32362, 58198, 2887, 3205, 8557, 9600, 9693, 44867, 53058, 55556, 57658, 2208, 10252, 10302, 14218, 33877, 10317, 10485, 25964, 14815, 1363, 1397, 14827, 21708, 3801, 64698, 2179 or 13249 activity may be increased to levels wherein the symptoms of the cancer are ameliorated. The level of 15986, 2188, 20743, 9148, 9151, 9791, 44252, 14184, 42461, 8204, 7970, 25552, 21657, 26492, 2411, 15088, 1905, 28899, 63380, 33935, 10480, 12686, 25501, 17694, 15701, 53062, 49908, 21612, 38949, 6216, 46863, 9235, 2201, 6985, 9883, 12238, 18057, 21617, 39228, 49928, 54476, 62113, 64316, 12264, 32362, 58198, 2887, 3205, 8557, 9600, 9693, 44867, 53058, 55556, 57658, 2208, 10252, 10302, 14218, 33877, 10317, 10485, 25964, 14815, 1363, 1397, 14827, 21708, 3801, 64698, 2179 or 13249 activity may be increased, for example, by either increasing the level of 15986, 2188, 20743, 9148, 9151, 9791, 44252, 14184, 42461, 8204, 7970, 25552, 21657, 26492, 2411, 15088, 1905, 28899, 63380, 33935, 10480, 12686, 25501, 17694, 15701, 53062, 49908, 21612, 38949, 6216, 46863, 9235, 2201, 6985, 9883, 12238, 18057, 21617, 39228, 49928, 54476, 62113, 64316, 12264, 32362, 58198, 2887, 3205, 8557, 9600, 9693, 44867, 53058, 55556, 57658, 2208, 10252, 10302, 14218, 33877, 10317, 10485, 25964, 14815, 1363, 1397, 14827, 21708, 3801, 64698, 2179 or 13249 gene expression or by increasing the level of active 15986, 2188, 20743, 9148, 9151, 9791, 44252, 14184, 42461, 8204, 7970, 25552, 21657, 26492, 2411, 15088, 1905, 28899, 63380, 33935, 10480, 12686, 25501, 17694, 15701, 53062, 49908, 21612, 38949, 6216, 46863, 9235, 2201, 6985, 9883, 12238, 18057, 21617, 39228, 49928, 54476, 62113, 64316, 12264, 32362, 58198, 2887, 3205, 8557, 9600, 9693, 44867, 53058, 55556, 57658, 2208, 10252, 10302, 14218, 33877, 10317, 10485, 25964, 14815, 1363, 1397, 14827, 21708, 3801, 64698, 2179 or 13249 protein which is present.

[0955] For example, a 15986, 2188, 20743, 9148, 9151, 9791, 44252, 14184, 42461, 8204, 7970, 25552, 21657, 26492, 2411, 15088, 1905, 28899, 63380, 33935, 10480, 12686, 25501, 17694, 15701, 53062, 49908, 21612, 38949, 6216, 46863, 9235, 2201, 6985, 9883, 12238, 18057, 21617, 39228, 49928, 54476, 62113, 64316, 12264, 32362, 58198, 2887, 3205, 8557, 9600, 9693, 44867, 53058, 55556, 57658, 2208, 10252, 10302, 14218, 33877, 10317, 10485, 25964, 14815, 1363, 1397, 14827, 21708, 3801, 64698, 2179 or 13249 protein, at a level sufficient to ameliorate at least one symptom of a cancer may be administered to a patient exhibiting such symptoms. Any of the techniques discussed below may be used for such administration. One of skill in the art will readily know how to determine the concentration of effective, non-toxic doses of the 15986, 2188, 20743, 9148, 9151, 9791, 44252, 14184, 42461, 8204, 7970, 25552, 21657, 26492, 2411, 15088, 1905, 28899, 63380, 33935, 10480, 12686, 25501, 17694, 15701, 53062, 49908, 21612, 38949, 6216, 46863, 9235, 2201, 6985, 9883, 12238, 18057, 21617, 39228, 49928, 54476, 62113, 64316, 12264, 32362, 58198, 2887, 3205, 8557, 9600, 9693, 44867, 53058, 55556, 57658, 2208, 10252, 10302, 14218, 33877, 10317, 10485, 25964, 14815, 1363, 1397, 14827, 21708, 3801, 64698, 2179 or 13249 protein, utilizing techniques such as those described below.

[0956] Additionally, RNA sequences encoding a 15986, 2188, 20743, 9148, 9151, 9791, 44252, 14184, 42461, 8204, 7970, 25552, 21657, 26492, 2411, 15088, 1905, 28899, 63380, 33935, 10480, 12686, 25501, 17694, 15701, 53062, 49908, 21612, 38949, 6216, 46863, 9235, 2201, 6985, 9883, 12238, 18057, 21617, 39228, 49928, 54476, 62113, 64316, 12264, 32362, 58198, 2887, 3205, 8557, 9600, 9693, 44867, 53058, 55556, 57658, 2208, 10252, 10302, 14218, 33877, 10317, 10485, 25964, 14815, 1363, 1397, 14827, 21708, 3801, 64698, 2179 or 13249 protein may be directly administered to a patient exhibiting a cancer, at a concentration sufficient to produce a level of 15986, 2188, 20743, 9148, 9151, 9791, 44252, 14184, 42461, 8204, 7970, 25552, 21657, 26492, 2411, 15088, 1905, 28899, 63380, 33935, 10480, 12686, 25501, 17694, 15701, 53062, 49908, 21612, 38949, 6216, 46863, 9235, 2201, 6985, 9883, 12238, 18057, 21617, 39228, 49928, 54476, 62113, 64316, 12264, 32362, 58198, 2887, 3205, 8557, 9600, 9693, 44867, 53058, 55556, 57658, 2208, 10252, 10302, 14218, 33877, 10317, 10485, 25964, 14815, 1363, 1397, 14827, 21708, 3801, 64698, 2179 or 13249 protein such that a cancer are ameliorated. Any of the techniques discussed below, which achieve intracellular administration of compounds, such as, for example, liposome administration, may be used for the administration of such RNA molecules. The RNA molecules may be produced, for example, by recombinant techniques such as those described herein.

[0957] Further, subjects may be treated by gene replacement therapy. One or more copies of a 15986, 2188, 20743, 9148, 9151, 9791, 44252, 14184, 42461, 8204, 7970, 25552, 21657, 26492, 2411, 15088, 1905, 28899, 63380, 33935, 10480, 12686, 25501, 17694, 15701, 53062, 49908, 21612, 38949, 6216, 46863, 9235, 2201, 6985, 9883, 12238, 18057, 21617, 39228, 49928, 54476, 62113, 64316, 12264, 32362, 58198, 2887, 3205, 8557, 9600, 9693, 44867, 53058, 55556, 57658, 2208, 10252, 10302, 14218, 33877, 10317, 10485, 25964, 14815, 1363, 1397, 14827, 21708, 3801, 64698, 2179 or 13249 gene, or a portion thereof, that directs the production of a normal 15986, 2188, 20743, 9148, 9151, 9791, 44252, 14184, 42461, 8204, 7970, 25552, 21657, 26492, 2411, 15088, 1905, 28899, 63380, 33935, 10480, 12686, 25501, 17694, 15701, 53062, 49908, 21612, 38949, 6216, 46863, 9235, 2201, 6985, 9883, 12238, 18057, 21617, 39228, 49928, 54476, 62113, 64316, 12264, 32362, 58198, 2887, 3205, 8557, 9600, 9693, 44867, 53058, 55556, 57658, 2208, 10252, 10302, 14218, 33877, 10317, 10485, 25964, 14815, 1363, 1397, 14827, 21708, 3801, 64698, 2179 or 13249 protein with 15986, 2188, 20743, 9148, 9151, 9791, 44252, 14184, 42461, 8204, 7970, 25552, 21657, 26492, 2411, 15088, 1905, 28899, 63380, 33935, 10480, 12686, 25501, 17694, 15701, 53062, 49908, 21612, 38949, 6216, 46863, 9235, 2201, 6985, 9883, 12238, 18057, 21617, 39228, 49928, 54476, 62113, 64316, 12264, 32362, 58198, 2887, 3205, 8557, 9600, 9693, 44867, 53058, 55556, 57658, 2208, 10252, 10302, 14218, 33877, 10317, 10485, 25964, 14815, 1363, 1397, 14827, 21708, 3801, 64698, 2179 or 13249 function, may be inserted into cells using vectors which include, but are not limited to adenovirus, adeno-associated virus, and retrovirus vectors, in addition to other particles that introduce DNA into cells, such as liposomes. Additionally, techniques such as those described above may be used for the introduction of 15986, 2188, 20743, 9148, 9151, 9791, 44252, 14184, 42461, 8204, 7970, 25552, 21657, 26492, 2411, 15088, 1905, 28899, 63380, 33935, 10480, 12686, 25501, 17694, 15701, 53062, 49908, 21612, 38949, 6216, 46863, 9235, 2201, 6985, 9883, 12238, 18057, 21617, 39228, 49928, 54476, 62113, 64316, 12264, 32362, 58198, 2887, 3205, 8557, 9600, 9693, 44867, 53058, 55556, 57658, 2208, 10252, 10302, 14218, 33877, 10317, 10485, 25964, 14815, 1363, 1397, 14827, 21708, 3801, 64698, 2179 or 13249 gene sequences into human cells.

[0958] Cells, preferably, autologous cells, containing 15986, 2188, 20743, 9148, 9151, 9791, 44252, 14184, 42461, 8204, 7970, 25552, 21657, 26492, 2411, 15088, 1905, 28899, 63380, 33935, 10480, 12686, 25501, 17694, 15701, 53062, 49908, 21612, 38949, 6216, 46863, 9235, 2201, 6985, 9883, 12238, 18057, 21617, 39228, 49928, 54476, 62113, 64316, 12264, 32362, 58198, 2887, 3205, 8557, 9600, 9693, 44867, 53058, 55556, 57658, 2208, 10252, 10302, 14218, 33877, 10317, 10485, 25964, 14815, 1363, 1397, 14827, 21708, 3801, 64698, 2179 or 13249 expressing gene sequences may then be introduced or reintroduced into the subject at positions which allow for the amelioration of at least one symptom of a cancer. Such cell replacement techniques may be preferred, for example, when the gene product is a secreted, extracellular gene product.

[0959] Pharmaceutical Compositions

[0960] Another aspect of the invention pertains to methods for treating a subject suffering from a disease. These methods involve administering to a subject an agent which modulates 15986, 2188, 20743, 9148, 9151, 9791, 44252, 14184, 42461, 8204, 7970, 25552, 21657, 26492, 2411, 15088, 1905, 28899, 63380, 33935, 10480, 12686, 25501, 17694, 15701, 53062, 49908, 21612, 38949, 6216, 46863, 9235, 2201, 6985, 9883, 12238, 18057, 21617, 39228, 49928, 54476, 62113, 64316, 12264, 32362, 58198, 2887, 3205, 8557, 9600, 9693, 44867, 53058, 55556, 57658, 2208, 10252, 10302, 14218, 33877, 10317, 10485, 25964, 14815, 1363, 1397, 14827, 21708, 3801, 64698, 2179 or 13249 expression or activity (e.g., an agent identified by a screening assay described herein), or a combination of such agents. In another embodiment, the method involves administering to a subject a 15986, 2188, 20743, 9148, 9151, 9791, 44252, 14184, 42461, 8204, 7970, 25552, 21657, 26492, 2411, 15088, 1905, 28899, 63380, 33935, 10480, 12686, 25501, 17694, 15701, 53062, 49908, 21612, 38949, 6216, 46863, 9235, 2201, 6985, 9883, 12238, 18057, 21617, 39228, 49928, 54476, 62113, 64316, 12264, 32362, 58198, 2887, 3205, 8557, 9600, 9693, 44867, 53058, 55556, 57658, 2208, 10252, 10302, 14218, 33877, 10317, 10485, 25964, 14815, 1363, 1397, 14827, 21708, 3801, 64698, 2179 or 13249 protein or nucleic acid molecule as therapy to compensate for reduced, aberrant, or unwanted 15986, 2188, 20743, 9148, 9151, 9791, 44252, 14184, 42461, 8204, 7970, 25552, 21657, 26492, 2411, 15088, 1905, 28899, 63380, 33935, 10480, 12686, 25501, 17694, 15701, 53062, 49908, 21612, 38949, 6216, 46863, 9235, 2201, 6985, 9883, 12238, 18057, 21617, 39228, 49928, 54476, 62113, 64316, 12264, 32362, 58198, 2887, 3205, 8557, 9600, 9693, 44867, 53058, 55556, 57658, 2208, 10252, 10302, 14218, 33877, 10317, 10485, 25964, 14815, 1363, 1397, 14827, 21708, 3801, 64698, 2179 or 13249 expression or activity.

[0961] Stimulation of 15986, 2188, 20743, 9148, 9151, 9791, 44252, 14184, 42461, 8204, 7970, 25552, 21657, 26492, 2411, 15088, 1905, 28899, 63380, 33935, 10480, 12686, 25501, 17694, 15701, 53062, 49908, 21612, 38949, 6216, 46863, 9235, 2201, 6985, 9883, 12238, 18057, 21617, 39228, 49928, 54476, 62113, 64316, 12264, 32362, 58198, 2887, 3205, 8557, 9600, 9693, 44867, 53058, 55556, 57658, 2208, 10252, 10302, 14218, 33877, 10317, 10485, 25964, 14815, 1363, 1397, 14827, 21708, 3801, 64698, 2179 or 13249 activity is desirable in situations in which 15986, 2188, 20743, 9148, 9151, 9791, 44252, 14184, 42461, 8204, 7970, 25552, 21657, 26492, 2411, 15088, 1905, 28899, 63380, 33935, 10480, 12686, 25501, 17694, 15701, 53062, 49908, 21612, 38949, 6216, 46863, 9235, 2201, 6985, 9883, 12238, 18057, 21617, 39228, 49928, 54476, 62113, 64316, 12264, 32362, 58198, 2887, 3205, 8557, 9600, 9693, 44867, 53058, 55556, 57658, 2208, 10252, 10302, 14218, 33877, 10317, 10485, 25964, 14815, 1363, 1397, 14827, 21708, 3801, 64698, 2179 or 13249 is abnormally downregulated and/or in which increased 15986, 2188, 20743, 9148, 9151, 9791, 44252, 14184, 42461, 8204, 7970, 25552, 21657, 26492, 2411, 15088, 1905, 28899, 63380, 33935, 10480, 12686, 25501, 17694, 15701, 53062, 49908, 21612, 38949, 6216, 46863, 9235, 2201, 6985, 9883, 12238, 18057, 21617, 39228, 49928, 54476, 62113, 64316, 12264, 32362, 58198, 2887, 3205, 8557, 9600, 9693, 44867, 53058, 55556, 57658, 2208, 10252, 10302, 14218, 33877, 10317, 10485, 25964, 14815, 1363, 1397, 14827, 21708, 3801, 64698, 2179 or 13249 activity is likely to have a beneficial effect. Likewise, inhibition of 15986, 2188, 20743, 9148, 9151, 9791, 44252, 14184, 42461, 8204, 7970, 25552, 21657, 26492, 2411, 15088, 1905, 28899, 63380, 33935, 10480, 12686, 25501, 17694, 15701, 53062, 49908, 21612, 38949, 6216, 46863, 9235, 2201, 6985, 9883, 12238, 18057, 21617, 39228, 49928, 54476, 62113, 64316, 12264, 32362, 58198, 2887, 3205, 8557, 9600, 9693, 44867, 53058, 55556, 57658, 2208, 10252, 10302, 14218, 33877, 10317, 10485, 25964, 14815, 1363, 1397, 14827, 21708, 3801, 64698, 2179 or 13249 activity is desirable in situations in which 15986, 2188, 20743, 9148, 9151, 9791, 44252, 14184, 42461, 8204, 7970, 25552, 21657, 26492, 2411, 15088, 1905, 28899, 63380, 33935, 10480, 12686, 25501, 17694, 15701, 53062, 49908, 21612, 38949, 6216, 46863, 9235, 2201, 6985, 9883, 12238, 18057, 21617, 39228, 49928, 54476, 62113, 64316, 12264, 32362, 58198, 2887, 3205, 8557, 9600, 9693, 44867, 53058, 55556, 57658, 2208, 10252, 10302, 14218, 33877, 10317, 10485, 25964, 14815, 1363, 1397, 14827, 21708, 3801, 64698, 2179 or 13249 is abnormally upregulated and/or in which decreased 15986, 2188, 20743, 9148, 9151, 9791, 44252, 14184, 42461, 8204, 7970, 25552, 21657, 26492, 2411, 15088, 1905, 28899, 63380, 33935, 10480, 12686, 25501, 17694, 15701, 53062, 49908, 21612, 38949, 6216, 46863, 9235, 2201, 6985, 9883, 12238, 18057, 21617, 39228, 49928, 54476, 62113, 64316, 12264, 32362, 58198, 2887, 3205, 8557, 9600, 9693, 44867, 53058, 55556, 57658, 2208, 10252, 10302, 14218, 33877, 10317, 10485, 25964, 14815, 1363, 1397, 14827, 21708, 3801, 64698, 2179 or 13249 activity is likely to have a beneficial effect.

[0962] The agents which modulate 15986, 2188, 20743, 9148, 9151, 9791, 44252, 14184, 42461, 8204, 7970, 25552, 21657, 26492, 2411, 15088, 1905, 28899, 63380, 33935, 10480, 12686, 25501, 17694, 15701, 53062, 49908, 21612, 38949, 6216, 46863, 9235, 2201, 6985, 9883, 12238, 18057, 21617, 39228, 49928, 54476, 62113, 64316, 12264, 32362, 58198, 2887, 3205, 8557, 9600, 9693, 44867, 53058, 55556, 57658, 2208, 10252, 10302, 14218, 33877, 10317, 10485, 25964, 14815, 1363, 1397, 14827, 21708, 3801, 64698, 2179 or 13249 activity can be administered to a subject using pharmaceutical compositions suitable for such administration. Such compositions typically comprise the agent (e.g., nucleic acid molecule, protein, or antibody) and a pharmaceutically acceptable carrier. As used herein the language “pharmaceutically acceptable carrier” is intended to include any and all solvents, dispersion media, coatings, antibacterial and antifungal agents, isotonic and absorption delaying agents, and the like, compatible with pharmaceutical administration. The use of such media and agents for pharmaceutically active substances is well known in the art. Except insofar as any conventional media or agent is incompatible with the active compound, use thereof in the compositions is contemplated. Supplementary active compounds can also be incorporated into the compositions.

[0963] A pharmaceutical composition used in the therapeutic methods of the invention is formulated to be compatible with its intended route of administration. Examples of routes of administration include parenteral, e.g., intravenous, intradermal, subcutaneous, oral (e.g., inhalation), transdermal (topical), transmucosal, and rectal administration. Solutions or suspensions used for parenteral, intradermal, or subcutaneous application can include the following components: a sterile diluent such as water for injection, saline solution, fixed oils, polyethylene glycols, glycerine, propylene glycol or other synthetic solvents; antibacterial agents such as benzyl alcohol or methyl parabens; antioxidants such as ascorbic acid or sodium bisulfite; chelating agents such as ethylenediaminetetraacetic acid; buffers such as acetates, citrates or phosphates and agents for the adjustment of tonicity such as sodium chloride or dextrose. pH can be adjusted with acids or bases, such as hydrochloric acid or sodium hydroxide. The parenteral preparation can be enclosed in ampoules, disposable syringes or multiple dose vials made of glass or plastic.

[0964] Pharmaceutical compositions suitable for injectable use include sterile aqueous solutions (where water soluble) or dispersions and sterile powders for the extemporaneous preparation of sterile injectable solutions or dispersion. For intravenous administration, suitable carriers include physiological saline, bacteriostatic water, Cremophor EL™ (BASF, Parsippany, N.J.) or phosphate buffered saline (PBS). In all cases, the composition must be sterile and should be fluid to the extent that easy syringability exists. It must be stable under the conditions of manufacture and storage and must be preserved against the contaminating action of microorganisms such as bacteria and fungi. The carrier can be a solvent or dispersion medium containing, for example, water, ethanol, polyol (for example, glycerol, propylene glycol, and liquid polyetheylene glycol, and the like), and suitable mixtures thereof. The proper fluidity can be maintained, for example, by the use of a coating such as lecithin, by the maintenance of the required particle size in the case of dispersion and by the use of surfactants. Prevention of the action of microorganisms can be achieved by various antibacterial and antifungal agents, for example, parabens, chlorobutanol, phenol, ascorbic acid, thimerosal, and the like. In many cases, it will be preferable to include isotonic agents, for example, sugars, polyalcohols such as manitol, sorbitol, and sodium chloride in the composition. Prolonged absorption of the injectable compositions can be brought about by including in the composition an agent which delays absorption, for example, aluminum monostearate and gelatin.

[0965] Sterile injectable solutions can be prepared by incorporating the agent that modulates 15986, 2188, 20743, 9148, 9151, 9791, 44252, 14184, 42461, 8204, 7970, 25552, 21657, 26492, 2411, 15088, 1905, 28899, 63380, 33935, 10480, 12686, 25501, 17694, 15701, 53062, 49908, 21612, 38949, 6216, 46863, 9235, 2201, 6985, 9883, 12238, 18057, 21617, 39228, 49928, 54476, 62113, 64316, 12264, 32362, 58198, 2887, 3205, 8557, 9600, 9693, 44867, 53058, 55556, 57658, 2208, 10252, 10302, 14218, 33877, 10317, 10485, 25964, 14815, 1363, 1397, 14827, 21708, 3801, 64698, 2179 or 13249 activity (e.g., a fragment of a 15986, 2188, 20743, 9148, 9151, 9791, 44252, 14184, 42461, 8204, 7970, 25552, 21657, 26492, 2411, 15088, 1905, 28899, 63380, 33935, 10480, 12686, 25501, 17694, 15701, 53062, 49908, 21612, 38949, 6216, 46863, 9235, 2201, 6985, 9883, 12238, 18057, 21617, 39228, 49928, 54476, 62113, 64316, 12264, 32362, 58198, 2887, 3205, 8557, 9600, 9693, 44867, 53058, 55556, 57658, 2208, 10252, 10302, 14218, 33877, 10317, 10485, 25964, 14815, 1363, 1397, 14827, 21708, 3801, 64698, 2179 or 13249 protein or an anti-15986, 2188, 20743, 9148, 9151, 9791, 44252, 14184, 42461, 8204, 7970, 25552, 21657, 26492, 2411, 15088, 1905, 28899, 63380, 33935, 10480, 12686, 25501, 17694, 15701, 53062, 49908, 21612, 38949, 6216, 46863, 9235, 2201, 6985, 9883, 12238, 18057, 21617, 39228, 49928, 54476, 62113, 64316, 12264, 32362, 58198, 2887, 3205, 8557, 9600, 9693, 44867, 53058, 55556, 57658, 2208, 10252, 10302, 14218, 33877, 10317, 10485, 25964, 14815, 1363, 1397, 14827, 21708, 3801, 64698, 2179 or 13249 antibody) in the required amount in an appropriate solvent with one or a combination of ingredients enumerated above, as required, followed by filtered sterilization. Generally, dispersions are prepared by incorporating the active compound into a sterile vehicle which contains a basic dispersion medium and the required other ingredients from those enumerated above. In the case of sterile powders for the preparation of sterile injectable solutions, the preferred methods of preparation are vacuum drying and freeze-drying which yields a powder of the active ingredient plus any additional desired ingredient from a previously sterile-filtered solution thereof.

[0966] Oral compositions generally include an inert diluent or an edible carrier. They can be enclosed in gelatin capsules or compressed into tablets. For the purpose of oral therapeutic administration, the active compound can be incorporated with excipients and used in the form of tablets, troches, or capsules. Oral compositions can also be prepared using a fluid carrier for use as a mouthwash, wherein the compound in the fluid carrier is applied orally and swished and expectorated or swallowed. Pharmaceutically compatible binding agents, and/or adjuvant materials can be included as part of the composition. The tablets, pills, capsules, troches and the like can contain any of the following ingredients, or compounds of a similar nature: a binder such as microcrystalline cellulose, gum tragacanth or gelatin; an excipient such as starch or lactose, a disintegrating agent such as alginic acid, Primogel, or corn starch; a lubricant such as magnesium stearate or Sterotes; a glidant such as colloidal silicon dioxide; a sweetening agent such as sucrose or saccharin; or a flavoring agent such as peppermint, methyl salicylate, or orange flavoring.

[0967] For administration by inhalation, the compounds are delivered in the form of an aerosol spray from pressured container or dispenser which contains a suitable propellant, e.g., a gas such as carbon dioxide, or a nebulizer.

[0968] Systemic administration can also be by transmucosal or transdermal means. For transmucosal or transdermal administration, penetrants appropriate to the barrier to be permeated are used in the formulation. Such penetrants are generally known in the art, and include, for example, for transmucosal administration, detergents, bile salts, and fusidic acid derivatives. Transmucosal administration can be accomplished through the use of nasal sprays or suppositories. For transdermal administration, the active compounds are formulated into ointments, salves, gels, or creams as generally known in the art.

[0969] The agents that modulate 15986, 2188, 20743, 9148, 9151, 9791, 44252, 14184, 42461, 8204, 7970, 25552, 21657, 26492, 2411, 15088, 1905, 28899, 63380, 33935, 10480, 12686, 25501, 17694, 15701, 53062, 49908, 21612, 38949, 6216, 46863, 9235, 2201, 6985, 9883, 12238, 18057, 21617, 39228, 49928, 54476, 62113, 64316, 12264, 32362, 58198, 2887, 3205, 8557, 9600, 9693, 44867, 53058, 55556, 57658, 2208, 10252, 10302, 14218, 33877, 10317, 10485, 25964, 14815, 1363, 1397, 14827, 21708, 3801, 64698, 2179 or 13249 activity can also be prepared in the form of suppositories (e.g., with conventional suppository bases such as cocoa butter and other glycerides) or retention enemas for rectal delivery.

[0970] In one embodiment, the agents that modulate 15986, 2188, 20743, 9148, 9151, 9791, 44252, 14184, 42461, 8204, 7970, 25552, 21657, 26492, 2411, 15088, 1905, 28899, 63380, 33935, 10480, 12686, 25501, 17694, 15701, 53062, 49908, 21612, 38949, 6216, 46863, 9235, 2201, 6985, 9883, 12238, 18057, 21617, 39228, 49928, 54476, 62113, 64316, 12264, 32362, 58198, 2887, 3205, 8557, 9600, 9693, 44867, 53058, 55556, 57658, 2208, 10252, 10302, 14218, 33877, 10317, 10485, 25964, 14815, 1363, 1397, 14827, 21708, 3801, 64698, 2179 or 13249 activity are prepared with carriers that will protect the compound against rapid elimination from the body, such as a controlled release formulation, including implants and microencapsulated delivery systems. Biodegradable, biocompatible polymers can be used, such as ethylene vinyl acetate, polyanhydrides, polyglycolic acid, collagen, polyorthoesters, and polylactic acid. Methods for preparation of such formulations will be apparent to those skilled in the art. The materials can also be obtained commercially from Alza Corporation and Nova Pharmaceuticals, Inc. Liposomal suspensions (including liposomes targeted to infected cells with monoclonal antibodies to viral antigens) can also be used as pharmaceutically acceptable carriers. These can be prepared according to methods known to those skilled in the art, for example, as described in U.S. Pat. No. 4,522,811.

[0971] It is especially advantageous to formulate oral or parenteral compositions in dosage unit form for ease of administration and uniformity of dosage. Dosage unit form as used herein refers to physically discrete units suited as unitary dosages for the subject to be treated; each unit containing a predetermined quantity of active compound calculated to produce the desired therapeutic effect in association with the required pharmaceutical carrier. The specification for the dosage unit forms of the invention are dictated by and directly dependent on the unique characteristics of the agent that modulates 15986, 2188, 20743, 9148, 9151, 9791, 44252, 14184, 42461, 8204, 7970, 25552, 21657, 26492, 2411, 15088, 1905, 28899, 63380, 33935, 10480, 12686, 25501, 17694, 15701, 53062, 49908, 21612, 38949, 6216, 46863, 9235, 2201, 6985, 9883, 12238, 18057, 21617, 39228, 49928, 54476, 62113, 64316, 12264, 32362, 58198, 2887, 3205, 8557, 9600, 9693, 44867, 53058, 55556, 57658, 2208, 10252, 10302, 14218, 33877, 10317, 10485, 25964, 14815, 1363, 1397, 14827, 21708, 3801, 64698, 2179 or 13249 activity and the particular therapeutic effect to be achieved, and the limitations inherent in the art of compounding such an agent for the treatment of subjects.

[0972] Toxicity and therapeutic efficacy of such agents can be determined by standard pharmaceutical procedures in cell cultures or experimental animals, e.g., for determining the LD50 (the dose lethal to 50% of the population) and the ED50 (the dose therapeutically effective in 50% of the population). The dose ratio between toxic and therapeutic effects is the therapeutic index and can be expressed as the ratio LD50/ED50. Agents which exhibit large therapeutic indices are preferred. While agents that exhibit toxic side effects may be used, care should be taken to design a delivery system that targets such agents to the site of affected tissue in order to minimize potential damage to uninfected cells and, thereby, reduce side effects.

[0973] The data obtained from the cell culture assays and animal studies can be used in formulating a range of dosage for use in humans. The dosage of such 15986, 2188, 20743, 9148, 9151, 9791, 44252, 14184, 42461, 8204, 7970, 25552, 21657, 26492, 2411, 15088, 1905, 28899, 63380, 33935, 10480, 12686, 25501, 17694, 15701, 53062, 49908, 21612, 38949, 6216, 46863, 9235, 2201, 6985, 9883, 12238, 18057, 21617, 39228, 49928, 54476, 62113, 64316, 12264, 32362, 58198, 2887, 3205, 8557, 9600, 9693, 44867, 53058, 55556, 57658, 2208, 10252, 10302, 14218, 33877, 10317, 10485, 25964, 14815, 1363, 1397, 14827, 21708, 3801, 64698, 2179 or 13249 modulating agents lies preferably within a range of circulating concentrations that include the ED50 with little or no toxicity. The dosage may vary within this range depending upon the dosage form employed and the route of administration utilized. For any agent used in the therapeutic methods of the invention, the therapeutically effective dose can be estimated initially from cell culture assays. A dose may be formulated in animal models to achieve a circulating plasma concentration range that includes the IC50 (i.e., the concentration of the test compound which achieves a half-maximal inhibition of symptoms) as determined in cell culture. Such information can be used to more accurately determine useful doses in humans. Levels in plasma may be measured, for example, by high performance liquid chromatography.

[0974] As defined herein, a therapeutically effective amount of protein or polypeptide (i.e., an effective dosage) ranges from about 0.001 to 30 mg/kg body weight, preferably about 0.01 to 25 mg/kg body weight, more preferably about 0.1 to 20 mg/kg body weight, and even more preferably about 1 to 10 mg/kg, 2 to 9 mg/kg, 3 to 8 mg/kg, 4 to 7 mg/kg, or 5 to 6 mg/kg body weight. The skilled artisan will appreciate that certain factors may influence the dosage required to effectively treat a subject, including but not limited to the severity of the disease or disorder, previous treatments, the general health and/or age of the subject, and other diseases present. Moreover, treatment of a subject with a therapeutically effective amount of a protein, polypeptide, or antibody can include a single treatment or, preferably, can include a series of treatments.

[0975] In a preferred example, a subject is treated with antibody, protein, or polypeptide in the range of between about 0.1 to 20 mg/kg body weight, one time per week for between about 1 to 10 weeks, preferably between 2 to 8 weeks, more preferably between about 3 to 7 weeks, and even more preferably for about 4, 5, or 6 weeks. It will also be appreciated that the effective dosage of antibody, protein, or polypeptide used for treatment may increase or decrease over the course of a particular treatment. Changes in dosage may result and become apparent from the results of diagnostic assays as described herein.

[0976] The present invention encompasses agents which modulate expression or activity. An agent may, for example, be a small molecule. For example, such small molecules include, but are not limited to, peptides, peptidomimetics, amino acids, amino acid analogs, polynucleotides, polynucleotide analogs, nucleotides, nucleotide analogs, organic or inorganic compounds (i.e, including heteroorganic and organometallic compounds) having a molecular weight less than about 10,000 grams per mole, organic or inorganic compounds having a molecular weight less than about 5,000 grams per mole, organic or inorganic compounds having a molecular weight less than about 1,000 grams per mole, organic or inorganic compounds having a molecular weight less than about 500 grams per mole, and salts, esters, and other pharmaceutically acceptable forms of such compounds. It is understood that appropriate doses of small molecule agents depends upon a number of factors within the ken of the ordinarily skilled physician, veterinarian, or researcher. The dose(s) of the small molecule will vary, for example, depending upon the identity, size, and condition of the subject or sample being treated, further depending upon the route by which the composition is to be administered, if applicable, and the effect which the practitioner desires the small molecule to have upon the nucleic acid or polypeptide of the invention.

[0977] Exemplary doses include milligram or microgram amounts of the small molecule per kilogram of subject or sample weight (e.g., about 1 microgram per kilogram to about 500 milligrams per kilogram, about 100 micrograms per kilogram to about 5 milligrams per kilogram, or about 1 microgram per kilogram to about 50 micrograms per kilogram).

[0978] It is furthermore understood that appropriate doses of a small molecule depend upon the potency of the small molecule with respect to the expression or activity to be modulated. Such appropriate doses may be determined using the assays described herein. When one or more of these small molecules is to be administered to an animal (e.g., a human) in order to modulate expression or activity of a polypeptide or nucleic acid of the invention, a physician, veterinarian, or researcher may, for example, prescribe a relatively low dose at first, subsequently increasing the dose until an appropriate response is obtained. In addition, it is understood that the specific dose level for any particular animal subject will depend upon a variety of factors including the activity of the specific compound employed, the age, body weight, general health, gender, and diet of the subject, the time of administration, the route of administration, the rate of excretion, any drug combination, and the degree of expression or activity to be modulated.

[0979] Further, an antibody (or fragment thereof) may be conjugated to a therapeutic moiety such as a cytotoxin, a therapeutic agent or a radioactive metal ion. A cytotoxin or cytotoxic agent includes any agent that is detrimental to cells. Examples include taxol, cytochalasin B, gramicidin D, ethidium bromide, emetine, mitomycin, etoposide, tenoposide, vincristine, vinblastine, colchicin, doxorubicin, daunorubicin, dihydroxy anthracin dione, mitoxantrone, mithramycin, actinomycin D, 1-dehydrotestosterone, glucocorticoids, procaine, tetracaine, lidocaine, propranolol, and puromycin and analogs or homologs thereof. Therapeutic agents include, but are not limited to, antimetabolites (e.g., methotrexate, 6-mercaptopurine, 6-thioguanine, cytarabine, 5-fluorouracil decarbazine), alkylating agents (e.g., mechlorethamine, thioepa chlorambucil, melphalan, carmustine (BSNU) and lomustine (CCNU), cyclothosphamide, busulfan, dibromomannitol, streptozotocin, mitomycin C, and cis-dichlorodiamine platinum (II) (DDP) cisplatin), anthracyclines (e.g., daunorubicin (formerly daunomycin) and doxorubicin), antibiotics (e.g., dactinomycin (formerly actinomycin), bleomycin, mithramycin, and anthramycin (AMC)), and anti-mitotic agents (e.g., vincristine and vinblastine).

[0980] The conjugates of the invention can be used for modifying a given biological response, the drug moiety is not to be construed as limited to classical chemical therapeutic agents. For example, the drug moiety may be a protein or polypeptide possessing a desired biological activity. Such proteins may include, for example, a toxin such as abrin, ricin A, pseudomonas exotoxin, or diphtheria toxin; a protein such as tumor necrosis factor, alpha-interferon, beta-interferon, nerve growth factor, platelet derived growth factor, tissue plasminogen activator; or biological response modifiers such as, for example, lymphokines, interleukin-1 (“IL-1”), interleukin-2 (“IL-2”), interleukin-6 (“IL-6”), granulocyte macrophase colony stimulating factor (“GM-CSF”), granulocyte colony stimulating factor (“G-CSF”), or other growth factors.

[0981] Techniques for conjugating such therapeutic moiety to antibodies are well known, see, e.g., Arnon et al., “Monoclonal Antibodies For Immunotargeting Of Drugs In Cancer Therapy”, in Monoclonal Antibodies And Cancer Therapy, Reisfeld et al. (eds.), pp. 243-56 (Alan R. Liss, Inc. 1985); Hellstrom et al., “Antibodies For Drug Delivery”, in Controlled Drug Delivery (2^{nd} Ed.), Robinson et al. (eds.), pp. 623-53 (Marcel Dekker, Inc. 1987); Thorpe, “Antibody Carriers Of Cytotoxic Agents In Cancer Therapy: A Review”, in Monoclonal Antibodies '84: Biological And Clinical Applications, Pinchera et al. (eds.), pp. 475-506 (1985); “Analysis, Results, And Future Prospective Of The Therapeutic Use Of Radiolabeled Antibody In Cancer Therapy”, in Monoclonal Antibodies For Cancer Detection And Therapy, Baldwin et al. (eds.), pp. 303-16 (Academic Press 1985), and Thorpe et al., “The Preparation And Cytotoxic Properties Of Antibody-Toxin Conjugates”, Immunol. Rev., 62:119-58 (1982). Alternatively, an antibody can be conjugated to a second antibody to form an antibody heteroconjugate as described by Segal in U.S. Pat. No. 4,676,980.

[0982] The nucleic acid molecules used in the methods of the invention can be inserted into vectors and used as gene therapy vectors. Gene therapy vectors can be delivered to a subject by, for example, intravenous injection, local administration (see U.S. Pat. No. 5,328,470) or by stereotactic injection (see, e.g., Chen et al. (1994) Proc. Natl. Acad. Sci. USA 91:3054-3057). The pharmaceutical preparation of the gene therapy vector can include the gene therapy vector in an acceptable diluent, or can comprise a slow release matrix in which the gene delivery vehicle is imbedded. Alternatively, where the complete gene delivery vector can be produced intact from recombinant cells, e.g., retroviral vectors, the pharmaceutical preparation can include one or more cells which produce the gene delivery system.

[0983] Pharmacogenomics

[0984] In conjunction with the therapeutic methods of the invention, pharmacogenomics (i.e., the study of the relationship between a subject's genotype and that subject's response to a foreign compound or drug) may be considered. Differences in metabolism of therapeutics can lead to severe toxicity or therapeutic failure by altering the relation between dose and blood concentration of the pharmacologically active drug. Thus, a physician or clinician may consider applying knowledge obtained in relevant pharmacogenomics studies in determining whether to administer an agent which modulates 15986, 2188, 20743, 9148, 9151, 9791, 44252, 14184, 42461, 8204, 7970, 25552, 21657, 26492, 2411, 15088, 1905, 28899, 63380, 33935, 10480, 12686, 25501, 17694, 15701, 53062, 49908, 21612, 38949, 6216, 46863, 9235, 2201, 6985, 9883, 12238, 18057, 21617, 39228, 49928, 54476, 62113, 64316, 12264, 32362, 58198, 2887, 3205, 8557, 9600, 9693, 44867, 53058, 55556, 57658, 2208, 10252, 10302, 14218, 33877, 10317, 10485, 25964, 14815, 1363, 1397, 14827, 21708, 3801, 64698, 2179 or 13249 activity, as well as tailoring the dosage and/or therapeutic regimen of treatment with an agent which modulates 15986, 2188, 20743, 9148, 9151, 9791, 44252, 14184, 42461, 8204, 7970, 25552, 21657, 26492, 2411, 15088, 1905, 28899, 63380, 33935, 10480, 12686, 25501, 17694, 15701, 53062, 49908, 21612, 38949, 6216, 46863, 9235, 2201, 6985, 9883, 12238, 18057, 21617, 39228, 49928, 54476, 62113, 64316, 12264, 32362, 58198, 2887, 3205, 8557, 9600, 9693, 44867, 53058, 55556, 57658, 2208, 10252, 10302, 14218, 33877, 10317, 10485, 25964, 14815, 1363, 1397, 14827, 21708, 3801, 64698, 2179 or 13249 activity.

[0985] Pharmacogenomics deals with clinically significant hereditary variations in the response to drugs due to altered drug disposition and abnormal action in affected persons. See, for example, Eichelbaum, M. et al. (1996) Clin. Exp.Pharmacol. Physiol. 23(10-11): 983-985 and Linder, M. W. et al. (1997) Clin. Chem. 43(2):254-266. In general, two types of pharmacogenetic conditions can be differentiated. Genetic conditions transmitted as a single factor altering the way drugs act on the body (altered drug action) or genetic conditions transmitted as single factors altering the way the body acts on drugs (altered drug metabolism). These pharmacogenetic conditions can occur either as rare genetic defects or as naturally-occurring polymorphisms. For example, glucose-6-phosphate aminopeptidase deficiency (G6PD) is a common inherited enzymopathy in which the main clinical complication is haemolysis after ingestion of oxidant drugs (anti-malarials, sulfonamides, analgesics, nitrofurans) and consumption of fava beans.

[0986] One pharmacogenomics approach to identifying genes that predict drug response, known as “a genome-wide association”, relies primarily on a high-resolution map of the human genome consisting of already known gene-related markers (e.g., a “bi-allelic” gene marker map which consists of 60,000-100,000 polymorphic or variable sites on the human genome, each of which has two variants). Such a high-resolution genetic map can be compared to a map of the genome of each of a statistically significant number of patients taking part in a Phase II/III drug trial to identify markers associated with a particular observed drug response or side effect. Alternatively, such a high resolution map can be generated from a combination of some ten million known single nucleotide polymorphisms (SNPs) in the human genome. As used herein, a “SNP” is a common alteration that occurs in a single nucleotide base in a stretch of DNA. For example, a SNP may occur once per every 1000 bases of DNA. A SNP may be involved in a disease process, however, the vast majority may not be disease-associated. Given a genetic map based on the occurrence of such SNPs, individuals can be grouped into genetic categories depending on a particular pattern of SNPs in their individual genome. In such a manner, treatment regimens can be tailored to groups of genetically similar individuals, taking into account traits that may be common among such genetically similar individuals.

[0987] Alternatively, a method termed the “candidate gene approach” can be utilized to identify genes that predict drug response. According to this method, if a gene that encodes a drug target is known (e.g., a 15986, 2188, 20743, 9148, 9151, 9791, 44252, 14184, 42461, 8204, 7970, 25552, 21657, 26492, 2411, 15088, 1905, 28899, 63380, 33935, 10480, 12686, 25501, 17694, 15701, 53062, 49908, 21612, 38949, 6216, 46863, 9235, 2201, 6985, 9883, 12238, 18057, 21617, 39228, 49928, 54476, 62113, 64316, 12264, 32362, 58198, 2887, 3205, 8557, 9600, 9693, 44867, 53058, 55556, 57658, 2208, 10252, 10302, 14218, 33877, 10317, 10485, 25964, 14815, 1363, 1397, 14827, 21708, 3801, 64698, 2179 or 13249 protein used in the methods of the present invention), all common variants of that gene can be fairly easily identified in the population and it can be determined if having one version of the gene versus another is associated with a particular drug response.

[0988] As an illustrative embodiment, the activity of drug metabolizing enzymes is a major determinant of both the intensity and duration of drug action. The discovery of genetic polymorphisms of drug metabolizing enzymes (e.g., N-acetyltransferase 2 (NAT 2) and the cytochrome P450 enzymes CYP2D6 and CYP2C19) has provided an explanation as to why some patients do not obtain the expected drug effects or show exaggerated drug response and serious toxicity after taking the standard and safe dose of a drug. These polymorphisms are expressed in two phenotypes in the population, the extensive metabolizer (EM) and poor metabolizer (PM). The prevalence of PM is different among different populations. For example, the gene coding for CYP2D6 is highly polymorphic and several mutations have been identified in PM, which all lead to the absence of functional CYP2D6. Poor metabolizers of CYP2D6 and CYP2C19 quite frequently experience exaggerated drug response and side effects when they receive standard doses. If a metabolite is the active therapeutic moiety, PM show no therapeutic response, as demonstrated for the analgesic effect of codeine mediated by its CYP2D6-formed metabolite morphine. The other extreme are the so called ultra-rapid metabolizers who do not respond to standard doses. Recently, the molecular basis of ultra-rapid metabolism has been identified to be due to CYP2D6 gene amplification.

[0989] Alternatively, a method termed the “gene expression profiling” can be utilized to identify genes that predict drug response. For example, the gene expression of an animal dosed with a drug (e.g., a 15986, 2188, 20743, 9148, 9151, 9791, 44252, 14184, 42461, 8204, 7970, 25552, 21657, 26492, 2411, 15088, 1905, 28899, 63380, 33935, 10480, 12686, 25501, 17694, 15701, 53062, 49908, 21612, 38949, 6216, 46863, 9235, 2201, 6985, 9883, 12238, 18057, 21617, 39228, 49928, 54476, 62113, 64316, 12264, 32362, 58198, 2887, 3205, 8557, 9600, 9693, 44867, 53058, 55556, 57658, 2208, 10252, 10302, 14218, 33877, 10317, 10485, 25964, 14815, 1363, 1397, 14827, 21708, 3801, 64698, 2179 or 13249 molecule or 15986, 2188, 20743, 9148, 9151, 9791, 44252, 14184, 42461, 8204, 7970, 25552, 21657, 26492, 2411, 15088, 1905, 28899, 63380, 33935, 10480, 12686, 25501, 17694, 15701, 53062, 49908, 21612, 38949, 6216, 46863, 9235, 2201, 6985, 9883, 12238, 18057, 21617, 39228, 49928, 54476, 62113, 64316, 12264, 32362, 58198, 2887, 3205, 8557, 9600, 9693, 44867, 53058, 55556, 57658, 2208, 10252, 10302, 14218, 33877, 10317, 10485, 25964, 14815, 1363, 1397, 14827, 21708, 3801, 64698, 2179 or 13249 modulator used in the methods of the present invention) can give an indication whether gene pathways related to toxicity have been turned on.

[0990] Information generated from more than one of the above pharmacogenomics approaches can be used to determine appropriate dosage and treatment regimens for prophylactic or therapeutic treatment of a subject. This knowledge, when applied to dosing or drug selection, can avoid adverse reactions or therapeutic failure and, thus, enhance therapeutic or prophylactic efficiency when treating a subject suffering from a cancer, with an agent which modulates 15986, 2188, 20743, 9148, 9151, 9791, 44252, 14184, 42461, 8204, 7970, 25552, 21657, 26492, 2411, 15088, 1905, 28899, 63380, 33935, 10480, 12686, 25501, 17694, 15701, 53062, 49908, 21612, 38949, 6216, 46863, 9235, 2201, 6985, 9883, 12238, 18057, 21617, 39228, 49928, 54476, 62113, 64316, 12264, 32362, 58198, 2887, 3205, 8557, 9600, 9693, 44867, 53058, 55556, 57658, 2208, 10252, 10302, 14218, 33877, 10317, 10485, 25964, 14815, 1363, 1397, 14827, 21708, 3801, 64698, 2179 or 13249 activity.

[0991] Recombinant Expression Vectors and Host Cells Used in the Methods of the Invention

[0992] The methods of the invention (e.g., the screening assays described herein) include the use of vectors, preferably expression vectors, containing a nucleic acid encoding a 15986, 2188, 20743, 9148, 9151, 9791, 44252, 14184, 42461, 8204, 7970, 25552, 21657, 26492, 2411, 15088, 1905, 28899, 63380, 33935, 10480, 12686, 25501, 17694, 15701, 53062, 49908, 21612, 38949, 6216, 46863, 9235, 2201, 6985, 9883, 12238, 18057, 21617, 39228, 49928, 54476, 62113, 64316, 12264, 32362, 58198, 2887, 3205, 8557, 9600, 9693, 44867, 53058, 55556, 57658, 2208, 10252, 10302, 14218, 33877, 10317, 10485, 25964, 14815, 1363, 1397, 14827, 21708, 3801, 64698, 2179 or 13249 protein (or a portion thereof). As used herein, the term “vector” refers to a nucleic acid molecule capable of transporting another nucleic acid to which it has been linked. One type of vector is a “plasmid”, which refers to a circular double stranded DNA loop into which additional DNA segments can be ligated. Another type of vector is a viral vector, wherein additional DNA segments can be ligated into the viral genome. Certain vectors are capable of autonomous replication in a host cell into which they are introduced (e.g., bacterial vectors having a bacterial origin of replication and episomal mammalian vectors). Other vectors (e.g., non-episomal mammalian vectors) are integrated into the genome of a host cell upon introduction into the host cell, and thereby are replicated along with the host genome. Moreover, certain vectors are capable of directing the expression of genes to which they are operatively linked. Such vectors are referred to herein as “expression vectors”. In general, expression vectors of utility in recombinant DNA techniques are often in the form of plasmids. In the present specification, “plasmid” and “vector” can be used interchangeably as the plasmid is the most commonly used form of vector. However, the invention is intended to include such other forms of expression vectors, such as viral vectors (e.g., replication defective retroviruses, adenoviruses and adeno-associated viruses), which serve equivalent functions.

[0993] The recombinant expression vectors to be used in the methods of the invention comprise a nucleic acid of the invention in a form suitable for expression of the nucleic acid in a host cell, which means that the recombinant expression vectors include one or more regulatory sequences, selected on the basis of the host cells to be used for expression, which is operatively linked to the nucleic acid sequence to be expressed. Within a recombinant expression vector, “operably linked” is intended to mean that the nucleotide sequence of interest is linked to the regulatory sequence(s) in a manner which allows for expression of the nucleotide sequence (e.g., in an in vitro transcription/translation system or in a host cell when the vector is introduced into the host cell). The term “regulatory sequence” is intended to include promoters, enhancers and other expression control elements (e.g., polyadenylation signals). Such regulatory sequences are described, for example, in Goeddel (1990) Methods Enzymol. 185:3-7. Regulatory sequences include those which direct constitutive expression of a nucleotide sequence in many types of host cells and those which direct expression of the nucleotide sequence only in certain host cells (e.g., tissue-specific regulatory sequences). It will be appreciated by those skilled in the art that the design of the expression vector can depend on such factors as the choice of the host cell to be transformed, the level of expression of protein desired, and the like. The expression vectors of the invention can be introduced into host cells to thereby produce proteins or peptides, including fusion proteins or peptides, encoded by nucleic acids as described herein (e.g., 15986, 2188, 20743, 9148, 9151, 9791, 44252, 14184, 42461, 8204, 7970, 25552, 21657, 26492, 2411, 15088, 1905, 28899, 63380, 33935, 10480, 12686, 25501, 17694, 15701, 53062, 49908, 21612, 38949, 6216, 46863, 9235, 2201, 6985, 9883, 12238, 18057, 21617, 39228, 49928, 54476, 62113, 64316, 12264, 32362, 58198, 2887, 3205, 8557, 9600, 9693, 44867, 53058, 55556, 57658, 2208, 10252, 10302, 14218, 33877, 10317, 10485, 25964, 14815, 1363, 1397, 14827, 21708, 3801, 64698, 2179 or 13249 proteins, mutant forms of 15986, 2188, 20743, 9148, 9151, 9791, 44252, 14184, 42461, 8204, 7970, 25552, 21657, 26492, 2411, 15088, 1905, 28899, 63380, 33935, 10480, 12686, 25501, 17694, 15701, 53062, 49908, 21612, 38949, 6216, 46863, 9235, 2201, 6985, 9883, 12238, 18057, 21617, 39228, 49928, 54476, 62113, 64316, 12264, 32362, 58198, 2887, 3205, 8557, 9600, 9693, 44867, 53058, 55556, 57658, 2208, 10252, 10302, 14218, 33877, 10317, 10485, 25964, 14815, 1363, 1397, 14827, 21708, 3801, 64698, 2179 or 13249 proteins, fusion proteins, and the like).

[0994] The recombinant expression vectors to be used in the methods of the invention can be designed for expression of 15986, 2188, 20743, 9148, 9151, 9791, 44252, 14184, 42461, 8204, 7970, 25552, 21657, 26492, 2411, 15088, 1905, 28899, 63380, 33935, 10480, 12686, 25501, 17694, 15701, 53062, 49908, 21612, 38949, 6216, 46863, 9235, 2201, 6985, 9883, 12238, 18057, 21617, 39228, 49928, 54476, 62113, 64316, 12264, 32362, 58198, 2887, 3205, 8557, 9600, 9693, 44867, 53058, 55556, 57658, 2208, 10252, 10302, 14218, 33877, 10317, 10485, 25964, 14815, 1363, 1397, 14827, 21708, 3801, 64698, 2179 or 13249 proteins in prokaryotic or eukaryotic cells. For example, 15986, 2188, 20743, 9148, 9151, 9791, 44252, 14184, 42461, 8204, 7970, 25552, 21657, 26492, 2411, 15088, 1905, 28899, 63380, 33935, 10480, 12686, 25501, 17694, 15701, 53062, 49908, 21612, 38949, 6216, 46863, 9235, 2201, 6985, 9883, 12238, 18057, 21617, 39228, 49928, 54476, 62113, 64316, 12264, 32362, 58198, 2887, 3205, 8557, 9600, 9693, 44867, 53058, 55556, 57658, 2208, 10252, 10302, 14218, 33877, 10317, 10485, 25964, 14815, 1363, 1397, 14827, 21708, 3801, 64698, 2179 or 13249 proteins can be expressed in bacterial cells such as E. coli, insect cells (using baculovirus expression vectors), yeast cells, or mammalian cells. Suitable host cells are discussed further in Goeddel (1990) supra. Alternatively, the recombinant expression vector can be transcribed and translated in vitro, for example using T7 promoter regulatory sequences and T7 polymerase.

[0995] Expression of proteins in prokaryotes is most often carried out in E. coli with vectors containing constitutive or inducible promoters directing the expression of either fusion or non-fusion proteins. Fusion vectors add a number of amino acids to a protein encoded therein, usually to the amino terminus of the recombinant protein. Such fusion vectors typically serve three purposes: 1) to increase expression of recombinant protein; 2) to increase the solubility of the recombinant protein; and 3) to aid in the purification of the recombinant protein by acting as a ligand in affinity purification. Often, in fusion expression vectors, a proteolytic cleavage site is introduced at the junction of the fusion moiety and the recombinant protein to enable separation of the recombinant protein from the fusion moiety subsequent to purification of the fusion protein. Such enzymes, and their cognate recognition sequences, include Factor Xa, thrombin and enterokinase. Typical fusion expression vectors include pGEX (Pharmacia Biotech Inc; Smith, D. B. and Johnson, K. S. (1988) Gene 67:31-40), pMAL (New England Biolabs, Beverly, Mass.) and pRIT5 (Pharmacia, Piscataway, N.J.) which fuse glutathione S-transferase (GST), maltose E binding protein, or protein A, respectively, to the target recombinant protein.

[0996] Purified fusion proteins can be utilized in 15986, 2188, 20743, 9148, 9151, 9791, 44252, 14184, 42461, 8204, 7970, 25552, 21657, 26492, 2411, 15088, 1905, 28899, 63380, 33935, 10480, 12686, 25501, 17694, 15701, 53062, 49908, 21612, 38949, 6216, 46863, 9235, 2201, 6985, 9883, 12238, 18057, 21617, 39228, 49928, 54476, 62113, 64316, 12264, 32362, 58198, 2887, 3205, 8557, 9600, 9693, 44867, 53058, 55556, 57658, 2208, 10252, 10302, 14218, 33877, 10317, 10485, 25964, 14815, 1363, 1397, 14827, 21708, 3801, 64698, 2179 or 13249 activity assays, (e.g., direct assays or competitive assays described in detail below), or to generate antibodies specific for 15986, 2188, 20743, 9148, 9151, 9791, 44252, 14184, 42461, 8204, 7970, 25552, 21657, 26492, 2411, 15088, 1905, 28899, 63380, 33935, 10480, 12686, 25501, 17694, 15701, 53062, 49908, 21612, 38949, 6216, 46863, 9235, 2201, 6985, 9883, 12238, 18057, 21617, 39228, 49928, 54476, 62113, 64316, 12264, 32362, 58198, 2887, 3205, 8557, 9600, 9693, 44867, 53058, 55556, 57658, 2208, 10252, 10302, 14218, 33877, 10317, 10485, 25964, 14815, 1363, 1397, 14827, 21708, 3801, 64698, 2179 or 13249 proteins. In a preferred embodiment, a 15986, 2188, 20743, 9148, 9151, 9791, 44252, 14184, 42461, 8204, 7970, 25552, 21657, 26492, 2411, 15088, 1905, 28899, 63380, 33935, 10480, 12686, 25501, 17694, 15701, 53062, 49908, 21612, 38949, 6216, 46863, 9235, 2201, 6985, 9883, 12238, 18057, 21617, 39228, 49928, 54476, 62113, 64316, 12264, 32362, 58198, 2887, 3205, 8557, 9600, 9693, 44867, 53058, 55556, 57658, 2208, 10252, 10302, 14218, 33877, 10317, 10485, 25964, 14815, 1363, 1397, 14827, 21708, 3801, 64698, 2179 or 13249 fusion protein expressed in a retroviral expression vector of the present invention can be utilized to infect bone marrow cells which are subsequently transplanted into irradiated recipients. The pathology of the subject recipient is then examined after sufficient time has passed (e.g., six weeks).

[0997] In another embodiment, a nucleic acid of the invention is expressed in mammalian cells using a mammalian expression vector. Examples of mammalian expression vectors include pCDM8 (Seed, B. (1987) Nature 329:840) and pMT2PC (Kaufman et al. (1987) EMBO J. 6:187-195). When used in mammalian cells, the expression vector's control functions are often provided by viral regulatory elements. For example, commonly used promoters are derived from polyoma, Adenovirus 2, cytomegalovirus and Simian Virus 40. For other suitable expression systems for both prokaryotic and eukaryotic cells see chapters 16 and 17 of Sambrook, J. et al., Molecular Cloning: A Laboratory Manual. 2^{nd} ed., Cold Spring Harbor Laboratory, Cold Spring Harbor Laboratory Press, Cold Spring Harbor, N.Y., 1989.

[0998] In another embodiment, the recombinant mammalian expression vector is capable of directing expression of the nucleic acid preferentially in a particular cell type (e.g., tissue-specific regulatory elements are used to express the nucleic acid).

[0999] The methods of the invention may further use a recombinant expression vector comprising a DNA molecule of the invention cloned into the expression vector in an antisense orientation. That is, the DNA molecule is operatively linked to a regulatory sequence in a manner which allows for expression (by transcription of the DNA molecule) of an RNA molecule which is antisense to 15986, 2188, 20743, 9148, 9151, 9791, 44252, 14184, 42461, 8204, 7970, 25552, 21657, 26492, 2411, 15088, 1905, 28899, 63380, 33935, 10480, 12686, 25501, 17694, 15701, 53062, 49908, 21612, 38949, 6216, 46863, 9235, 2201, 6985, 9883, 12238, 18057, 21617, 39228, 49928, 54476, 62113, 64316, 12264, 32362, 58198, 2887, 3205, 8557, 9600, 9693, 44867, 53058, 55556, 57658, 2208, 10252, 10302, 14218, 33877, 10317, 10485, 25964, 14815, 1363, 1397, 14827, 21708, 3801, 64698, 2179 or 13249 mRNA. Regulatory sequences operatively linked to a nucleic acid cloned in the antisense orientation can be chosen which direct the continuous expression of the antisense RNA molecule in a variety of cell types, for instance viral promoters and/or enhancers, or regulatory sequences can be chosen which direct constitutive, tissue specific, or cell type specific expression of antisense RNA. The antisense expression vector can be in the form of a recombinant plasmid, phagemid, or attenuated virus in which antisense nucleic acids are produced under the control of a high efficiency regulatory region, the activity of which can be determined by the cell type into which the vector is introduced. For a discussion of the regulation of gene expression using antisense genes, see Weintraub, H. et al., Antisense RNA as a molecular tool for genetic analysis, Reviews—Trends in Genetics, Vol. 1(1) 1986.

[1000] Another aspect of the invention pertains to the use of host cells into which a 15986, 2188, 20743, 9148, 9151, 9791, 44252, 14184, 42461, 8204, 7970, 25552, 21657, 26492, 2411, 15088, 1905, 28899, 63380, 33935, 10480, 12686, 25501, 17694, 15701, 53062, 49908, 21612, 38949, 6216, 46863, 9235, 2201, 6985, 9883, 12238, 18057, 21617, 39228, 49928, 54476, 62113, 64316, 12264, 32362, 58198, 2887, 3205, 8557, 9600, 9693, 44867, 53058, 55556, 57658, 2208, 10252, 10302, 14218, 33877, 10317, 10485, 25964, 14815, 1363, 1397, 14827, 21708, 3801, 64698, 2179 or 13249 nucleic acid molecule of the invention is introduced, e.g., a 15986, 2188, 20743, 9148, 9151, 9791, 44252, 14184, 42461, 8204, 7970, 25552, 21657, 26492, 2411, 15088, 1905, 28899, 63380, 33935, 10480, 12686, 25501, 17694, 15701, 53062, 49908, 21612, 38949, 6216, 46863, 9235, 2201, 6985, 9883, 12238, 18057, 21617, 39228, 49928, 54476, 62113, 64316, 12264, 32362, 58198, 2887, 3205, 8557, 9600, 9693, 44867, 53058, 55556, 57658, 2208, 10252, 10302, 14218, 33877, 10317, 10485, 25964, 14815, 1363, 1397, 14827, 21708, 3801, 64698, 2179 or 13249 nucleic acid molecule within a recombinant expression vector or a 15986, 2188, 20743, 9148, 9151, 9791, 44252, 14184, 42461, 8204, 7970, 25552, 21657, 26492, 2411, 15088, 1905, 28899, 63380, 33935, 10480, 12686, 25501, 17694, 15701, 53062, 49908, 21612, 38949, 6216, 46863, 9235, 2201, 6985, 9883, 12238, 18057, 21617, 39228, 49928, 54476, 62113, 64316, 12264, 32362, 58198, 2887, 3205, 8557, 9600, 9693, 44867, 53058, 55556, 57658, 2208, 10252, 10302, 14218, 33877, 10317, 10485, 25964, 14815, 1363, 1397, 14827, 21708, 3801, 64698, 2179 or 13249 nucleic acid molecule containing sequences which allow it to homologously recombine into a specific site of the host cell's genome. The terms “host cell” and “recombinant host cell” are used interchangeably herein. It is understood that such terms refer not only to the particular subject cell but to the progeny or potential progeny of such a cell. Because certain modifications may occur in succeeding generations due to either mutation or environmental influences, such progeny may not, in fact, be identical to the parent cell, but are still included within the scope of the term as used herein.

[1001] A host cell can be any prokaryotic or eukaryotic cell. For example, a 15986, 2188, 20743, 9148, 9151, 9791, 44252, 14184, 42461, 8204, 7970, 25552, 21657, 26492, 2411, 15088, 1905, 28899, 63380, 33935, 10480, 12686, 25501, 17694, 15701, 53062, 49908, 21612, 38949, 6216, 46863, 9235, 2201, 6985, 9883, 12238, 18057, 21617, 39228, 49928, 54476, 62113, 64316, 12264, 32362, 58198, 2887, 3205, 8557, 9600, 9693, 44867, 53058, 55556, 57658, 2208, 10252, 10302, 14218, 33877, 10317, 10485, 25964, 14815, 1363, 1397, 14827, 21708, 3801, 64698, 2179 or 13249 protein can be expressed in bacterial cells such as E. coli, insect cells, yeast or mammalian cells (such as Chinese hamster ovary cells (CHO) or COS cells). Other suitable host cells are known to those skilled in the art.

[1002] Vector DNA can be introduced into prokaryotic or eukaryotic cells via conventional transformation or transfection techniques. As used herein, the terms “transformation” and “transfection” are intended to refer to a variety of art-recognized techniques for introducing foreign nucleic acid (e.g., DNA) into a host cell, including calcium phosphate or calcium chloride co-precipitation, DEAE-dextran-mediated transfection, lipofection, or electroporation. Suitable methods for transforming or transfecting host cells can be found in Sambrook et al. (Molecular Cloning: A Laboratory Manual. 2^{nd}, ed., Cold Spring Harbor Laboratory, Cold Spring Harbor Laboratory Press, Cold Spring Harbor, N.Y., 1989), and other laboratory manuals.

[1003] A host cell used in the methods of the invention, such as a prokaryotic or eukaryotic host cell in culture, can be used to produce (i.e., express) a 15986, 2188, 20743, 9148, 9151, 9791, 44252, 14184, 42461, 8204, 7970, 25552, 21657, 26492, 2411, 15088, 1905, 28899, 63380, 33935, 10480, 12686, 25501, 17694, 15701, 53062, 49908, 21612, 38949, 6216, 46863, 9235, 2201, 6985, 9883, 12238, 18057, 21617, 39228, 49928, 54476, 62113, 64316, 12264, 32362, 58198, 2887, 3205, 8557, 9600, 9693, 44867, 53058, 55556, 57658, 2208, 10252, 10302, 14218, 33877, 10317, 10485, 25964, 14815, 1363, 1397, 14827, 21708, 3801, 64698, 2179 or 13249 protein. Accordingly, the invention further provides methods for producing a 15986, 2188, 20743, 9148, 9151, 9791, 44252, 14184, 42461, 8204, 7970, 25552, 21657, 26492, 2411, 15088, 1905, 28899, 63380, 33935, 10480, 12686, 25501, 17694, 15701, 53062, 49908, 21612, 38949, 6216, 46863, 9235, 2201, 6985, 9883, 12238, 18057, 21617, 39228, 49928, 54476, 62113, 64316, 12264, 32362, 58198, 2887, 3205, 8557, 9600, 9693, 44867, 53058, 55556, 57658, 2208, 10252, 10302, 14218, 33877, 10317, 10485, 25964, 14815, 1363, 1397, 14827, 21708, 3801, 64698, 2179 or 13249 protein using the host cells of the invention. In one embodiment, the method comprises culturing the host cell of the invention (into which a recombinant expression vector encoding a 15986, 2188, 20743, 9148, 9151, 9791, 44252, 14184, 42461, 8204, 7970, 25552, 21657, 26492, 2411, 15088, 1905, 28899, 63380, 33935, 10480, 12686, 25501, 17694, 15701, 53062, 49908, 21612, 38949, 6216, 46863, 9235, 2201, 6985, 9883, 12238, 18057, 21617, 39228, 49928, 54476, 62113, 64316, 12264, 32362, 58198, 2887, 3205, 8557, 9600, 9693, 44867, 53058, 55556, 57658, 2208, 10252, 10302, 14218, 33877, 10317, 10485, 25964, 14815, 1363, 1397, 14827, 21708, 3801, 64698, 2179 or 13249 protein has been introduced) in a suitable medium such that a 15986, 2188, 20743, 9148, 9151, 9791, 44252, 14184, 42461, 8204, 7970, 25552, 21657, 26492, 2411, 15088, 1905, 28899, 63380, 33935, 10480, 12686, 25501, 17694, 15701, 53062, 49908, 21612, 38949, 6216, 46863, 9235, 2201, 6985, 9883, 12238, 18057, 21617, 39228, 49928, 54476, 62113, 64316, 12264, 32362, 58198, 2887, 3205, 8557, 9600, 9693, 44867, 53058, 55556, 57658, 2208, 10252, 10302, 14218, 33877, 10317, 10485, 25964, 14815, 1363, 1397, 14827, 21708, 3801, 64698, 2179 or 13249 protein is produced. In another embodiment, the method further comprises isolating a 15986, 2188, 20743, 9148, 9151, 9791, 44252, 14184, 42461, 8204, 7970, 25552, 21657, 26492, 2411, 15088, 1905, 28899, 63380, 33935, 10480, 12686, 25501, 17694, 15701, 53062, 49908, 21612, 38949, 6216, 46863, 9235, 2201, 6985, 9883, 12238, 18057, 21617, 39228, 49928, 54476, 62113, 64316, 12264, 32362, 58198, 2887, 3205, 8557, 9600, 9693, 44867, 53058, 55556, 57658, 2208, 10252, 10302, 14218, 33877, 10317, 10485, 25964, 14815, 1363, 1397, 14827, 21708, 3801, 64698, 2179 or 13249 protein from the medium or the host cell.

[1004] Isolated Nucleic Acid Molecules Used in the Methods of the Invention

[1005] The methods of the invention include the use of isolated nucleic acid molecules that encode 15986, 2188, 20743, 9148, 9151, 9791, 44252, 14184, 42461, 8204, 7970, 25552, 21657, 26492, 2411, 15088, 1905, 28899, 63380, 33935, 10480, 12686, 25501, 17694, 15701, 53062, 49908, 21612, 38949, 6216, 46863, 9235, 2201, 6985, 9883, 12238, 18057, 21617, 39228, 49928, 54476, 62113, 64316, 12264, 32362, 58198, 2887, 3205, 8557, 9600, 9693, 44867, 53058, 55556, 57658, 2208, 10252, 10302, 14218, 33877, 10317, 10485, 25964, 14815, 1363, 1397, 14827, 21708, 3801, 64698, 2179 or 13249 proteins or biologically active portions thereof, as well as nucleic acid fragments sufficient for use as hybridization probes to identify 15986, 2188, 20743, 9148, 9151, 9791, 44252, 14184, 42461, 8204, 7970, 25552, 21657, 26492, 2411, 15088, 1905, 28899, 63380, 33935, 10480, 12686, 25501, 17694, 15701, 53062, 49908, 21612, 38949, 6216, 46863, 9235, 2201, 6985, 9883, 12238, 18057, 21617, 39228, 49928, 54476, 62113, 64316, 12264, 32362, 58198, 2887, 3205, 8557, 9600, 9693, 44867, 53058, 55556, 57658, 2208, 10252, 10302, 14218, 33877, 10317, 10485, 25964, 14815, 1363, 1397, 14827, 21708, 3801, 64698, 2179 or 13249-encoding nucleic acid molecules (e.g., 15986, 2188, 20743, 9148, 9151, 9791, 44252, 14184, 42461, 8204, 7970, 25552, 21657, 26492, 2411, 15088, 1905, 28899, 63380, 33935, 10480, 12686, 25501, 17694, 15701, 53062, 49908, 21612, 38949, 6216, 46863, 9235, 2201, 6985, 9883, 12238, 18057, 21617, 39228, 49928, 54476, 62113, 64316, 12264, 32362, 58198, 2887, 3205, 8557, 9600, 9693, 44867, 53058, 55556, 57658, 2208, 10252, 10302, 14218, 33877, 10317, 10485, 25964, 14815, 1363, 1397, 14827, 21708, 3801, 64698, 2179 or 13249 mRNA) and fragments for use as PCR primers for the amplification or mutation of 15986, 2188, 20743, 9148, 9151, 9791, 44252, 14184, 42461, 8204, 7970, 25552, 21657, 26492, 2411, 15088, 1905, 28899, 63380, 33935, 10480, 12686, 25501, 17694, 15701, 53062, 49908, 21612, 38949, 6216, 46863, 9235, 2201, 6985, 9883, 12238, 18057, 21617, 39228, 49928, 54476, 62113, 64316, 12264, 32362, 58198, 2887, 3205, 8557, 9600, 9693, 44867, 53058, 55556, 57658, 2208, 10252, 10302, 14218, 33877, 10317, 10485, 25964, 14815, 1363, 1397, 14827, 21708, 3801, 64698, 2179 or 13249 nucleic acid molecules. As used herein, the term “nucleic acid molecule” is intended to include DNA molecules (e.g., cDNA or genomic DNA) and RNA molecules (e.g., mRNA) and analogs of the DNA or RNA generated using nucleotide analogs. The nucleic acid molecule can be single-stranded or double-stranded, but preferably is double-stranded DNA.

[1006] A nucleic acid molecule used in the methods of the present invention, e.g., a nucleic acid molecule having the nucleotide sequence of SEQ ID NO:1, 3, 5, 7, 9, 11, 13, 15, 17, 19, 21, 23, 25, 27, 29, 31, 33, 35, 37, 39, 41, 43, 45, 47, 49, 51, 53, 55, 57, 59, 61, 63, 65, 67, 69, 71, 73, 75, 77, 79, 81, 83, 85, 87, 89, 91, 93, 95, 97, 99, 101, 103, 105, 107, 109, 111, 113, 115, 117, 119, 121, 123, 125, 127, 129, 131, 133, 135, 137, 139, 141 or 143, or a portion thereof, can be isolated using standard molecular biology techniques and the sequence information provided herein. Using all or portion of the nucleic acid sequence of SEQ ID NO:1, 3, 5, 7, 9, 11, 13, 15, 17, 19, 21, 23, 25, 27, 29, 31, 33, 35, 37, 39, 41, 43, 45, 47, 49, 51, 53, 55, 57, 59, 61, 63, 65, 67, 69, 71, 73, 75, 77, 79, 81, 83, 85, 87, 89, 91, 93, 95, 97, 99, 101, 103, 105, 107, 109, 111, 113, 115, 117, 119, 121, 123, 125, 127, 129, 131, 133, 135, 137, 139, 141 or 143, as a hybridization probe, 15986, 2188, 20743, 9148, 9151, 9791, 44252, 14184, 42461, 8204, 7970, 25552, 21657, 26492, 2411, 15088, 1905, 28899, 63380, 33935, 10480, 12686, 25501, 17694, 15701, 53062, 49908, 21612, 38949, 6216, 46863, 9235, 2201, 6985, 9883, 12238, 18057, 21617, 39228, 49928, 54476, 62113, 64316, 12264, 32362, 58198, 2887, 3205, 8557, 9600, 9693, 44867, 53058, 55556, 57658, 2208, 10252, 10302, 14218, 33877, 10317, 10485, 25964, 14815, 1363, 1397, 14827, 21708, 3801, 64698, 2179 or 13249 nucleic acid molecules can be isolated using standard hybridization and cloning techniques (e.g., as described in Sambrook, J., Fritsh, E. F., and Maniatis, T. Molecular Cloning: A Laboratory Manual. 2^{nd} ed., Cold Spring Harbor Laboratory, Cold Spring Harbor Laboratory Press, Cold Spring Harbor, N.Y., 1989).

[1007] Moreover, a nucleic acid molecule encompassing all or a portion of SEQ ID NO:1, 3, 5, 7, 9, 11, 13, 15, 17, 19, 21, 23, 25, 27, 29, 31, 33, 35, 37, 39, 41, 43, 45, 47, 49, 51, 53, 55, 57, 59, 61, 63, 65, 67, 69, 71, 73, 75, 77, 79, 81, 83, 85, 87, 89, 91, 93, 95, 97, 99, 101, 103, 105, 107, 109, 111, 113, 115, 117, 119, 121, 123, 125, 127, 129, 131, 133, 135, 137, 139, 141 or 143 can be isolated by the polymerase chain reaction (PCR) using synthetic oligonucleotide primers designed based upon the sequence of SEQ ID NO:1, 3, 5, 7, 9, 11, 13, 15, 17, 19, 21, 23, 25, 27, 29, 31, 33, 35, 37, 39, 41, 43, 45, 47, 49, 51, 53, 55, 57, 59, 61, 63, 65, 67, 69, 71, 73, 75, 77, 79, 81, 83, 85, 87, 89, 91, 93, 95, 97, 99, 101, 103, 105, 107, 109, 111, 113, 115, 117, 119, 121, 123, 125, 127, 129, 131, 133, 135, 137, 139, 141 or 143.

[1008] A nucleic acid used in the methods of the invention can be amplified using cDNA, mRNA or, alternatively, genomic DNA as a template and appropriate oligonucleotide primers according to standard PCR amplification techniques. Furthermore, oligonucleotides corresponding to 15986, 2188, 20743, 9148, 9151, 9791, 44252, 14184, 42461, 8204, 7970, 25552, 21657, 26492, 2411, 15088, 1905, 28899, 63380, 33935, 10480, 12686, 25501, 17694, 15701, 53062, 49908, 21612, 38949, 6216, 46863, 9235, 2201, 6985, 9883, 12238, 18057, 21617, 39228, 49928, 54476, 62113, 64316, 12264, 32362, 58198, 2887, 3205, 8557, 9600, 9693, 44867, 53058, 55556, 57658, 2208, 10252, 10302, 14218, 33877, 10317, 10485, 25964, 14815, 1363, 1397, 14827, 21708, 3801, 64698, 2179 or 13249 nucleotide sequences can be prepared by standard synthetic techniques, e.g., using an automated DNA synthesizer.

[1009] In a preferred embodiment, the isolated nucleic acid molecules used in the methods of the invention comprise the nucleotide sequence shown in SEQ ID NO:1, 3, 5, 7, 9, 11, 13, 15, 17, 19, 21, 23, 25, 27, 29, 31, 33, 35, 37, 39, 41, 43, 45, 47, 49, 51, 53, 55, 57, 59, 61, 63, 65, 67, 69, 71, 73, 75, 77, 79, 81, 83, 85, 87, 89, 91, 93, 95, 97, 99, 101, 103, 105, 107, 109, 111, 113, 115, 117, 119, 121, 123, 125, 127, 129, 131, 133, 135, 137, 139, 141 or 143, a complement of the nucleotide sequence shown in SEQ ID NO:1, 3, 5, 7, 9, 11, 13, 15, 17, 19, 21, 23, 25, 27, 29, 31, 33, 35, 37, 39, 41, 43, 45, 47, 49, 51, 53, 55, 57, 59, 61, 63, 65, 67, 69, 71, 73, 75, 77, 79, 81, 83, 85, 87, 89, 91, 93, 95, 97, 99, 101, 103, 105, 107, 109, 111, 113, 115, 117, 119, 121, 123, 125, 127, 129, 131, 133, 135, 137, 139, 141 or 143, or a portion of any of these nucleotide sequences. A nucleic acid molecule which is complementary to the nucleotide sequence shown in SEQ ID NO:1, 3, 5, 7, 9, 11, 13, 15, 17, 19, 21, 23, 25, 27, 29, 31, 33, 35, 37, 39, 41, 43, 45, 47, 49, 51, 53, 55, 57, 59, 61, 63, 65, 67, 69, 71, 73, 75, 77, 79, 81, 83, 85, 87, 89, 91, 93, 95, 97, 99, 101, 103, 105, 107, 109, 111, 113, 115, 117, 119, 121, 123, 125, 127, 129, 131, 133, 135, 137, 139, 141 or 143, is one which is sufficiently complementary to the nucleotide sequence shown in SEQ ID NO:1, 3, 5, 7, 9, 11, 13, 15, 17, 19, 21, 23, 25, 27, 29, 31, 33, 35, 37, 39, 41, 43, 45, 47, 49, 51, 53, 55, 57, 59, 61, 63, 65, 67, 69, 71, 73, 75, 77, 79, 81, 83, 85, 87, 89, 91, 93, 95, 97, 99, 101, 103, 105, 107, 109, 111, 113, 115, 117, 119, 121, 123, 125, 127, 129, 131, 133, 135, 137, 139, 141 or 143, such that it can hybridize to the nucleotide sequence shown in SEQ ID NO:1, 3, 5, 7, 9, 11, 13, 15, 17, 19, 21, 23, 25, 27, 29, 31, 33, 35, 37, 39, 41, 43, 45, 47, 49, 51, 53, 55, 57, 59, 61, 63, 65, 67, 69, 71, 73, 75, 77, 79, 81, 83, 85, 87, 89, 91, 93, 95, 97, 99, 101, 103, 105, 107, 109, 111, 113, 115, 117, 119, 121, 123, 125, 127, 129, 131, 133, 135, 137, 139, 141 or 143, thereby forming a stable duplex.

[1010] In still another preferred embodiment, an isolated nucleic acid molecule used in the methods of the present invention comprises a nucleotide sequence which is at least about 55%, 60%, 65%, 70%, 75%, 80%, 85%, 90%, 95%, 96%, 97%, 98%, 99% or more identical to the entire length of the nucleotide sequence shown in SEQ ID NO:1, 3, 5, 7, 9, 11, 13, 15, 17, 19, 21, 23, 25, 27, 29, 31, 33, 35, 37, 39, 41, 43, 45, 47, 49, 51, 53, 55, 57, 59, 61, 63, 65, 67, 69, 71, 73, 75, 77, 79, 81, 83, 85, 87, 89, 91, 93, 95, 97, 99, 101, 103, 105, 107, 109, 111, 113, 115, 117, 119, 121, 123, 125, 127, 129, 131, 133, 135, 137, 139, 141 or 143, or a portion of any of this nucleotide sequence.

[1011] Moreover, the nucleic acid molecules used in the methods of the invention can comprise only a portion of the nucleic acid sequence of SEQ ID NO:1, 3, 5, 7, 9, 11, 13, 15, 17, 19, 21, 23, 25, 27, 29, 31, 33, 35, 37, 39, 41, 43, 45, 47, 49, 51, 53, 55, 57, 59, 61, 63, 65, 67, 69, 71, 73, 75, 77, 79, 81, 83, 85, 87, 89, 91, 93, 95, 97, 99, 101, 103, 105, 107, 109, 111, 113, 115, 117, 119, 121, 123, 125, 127, 129, 131, 133, 135, 137, 139, 141 or 143 121, 123, 125, 127, 129, 131, 133, 135, 137, 139, 141 or 143, for example, a fragment which can be used as a probe or primer or a fragment encoding a portion of a 15986, 2188, 20743, 9148, 9151, 9791, 44252, 14184, 42461, 8204, 7970, 25552, 21657, 26492, 2411, 15088; 1905, 28899, 63380, 33935, 10480, 12686, 25501, 17694, 15701, 53062, 49908, 21612, 38949, 6216, 46863, 9235, 2201, 6985, 9883, 12238, 18057, 21617, 39228, 49928, 54476, 62113, 64316, 12264, 32362, 58198, 2887, 3205, 8557, 9600, 9693, 44867, 53058, 55556, 57658, 2208, 10252, 10302, 14218, 33877, 10317, 10485, 25964, 14815, 1363, 1397, 14827, 21708, 3801, 64698, 2179 or 13249 protein, e.g., a biologically active portion of a 15986, 2188, 20743, 9148, 9151, 9791, 44252, 14184, 42461, 8204, 7970, 25552, 21657, 26492, 2411, 15088, 1905, 28899, 63380, 33935, 10480, 12686, 25501, 17694, 15701, 53062, 49908, 21612, 38949, 6216, 46863, 9235, 2201, 6985, 9883, 12238, 18057, 21617, 39228, 49928, 54476, 62113, 64316, 12264, 32362, 58198, 2887, 3205, 8557, 9600, 9693, 44867, 53058, 55556, 57658, 2208, 10252, 10302, 14218, 33877, 10317, 10485, 25964, 14815, 1363, 1397, 14827, 21708, 3801, 64698, 2179 or 13249 protein. The probe/primer typically comprises substantially purified oligonucleotide. The oligonucleotide typically comprises a region of nucleotide sequence that hybridizes under stringent conditions to at least about 12 or 15, preferably about 20 or 25, more preferably about 30, 35, 40, 45, 50, 55, 60, 65, or 75 consecutive nucleotides of a sense sequence of SEQ ID NO:1, 3, 5, 7, 9, 11, 13, 15, 17, 19, 21, 23, 25, 27, 29, 31, 33, 35, 37, 39, 41, 43, 45, 47, 49, 51, 53, 55, 57, 59, 61, 63, 65, 67, 69, 71, 73, 75, 77, 79, 81, 83, 85, 87, 89, 91, 93, 95, 97, 99, 101, 103, 105, 107, 109, 111, 113, 115, 117, 119, 121, 123, 125, 127, 129, 131, 133, 135, 137, 139, 141 or 143, of an anti-sense sequence of SEQ ID NO:1, 3, 5, 7, 9, 11, 13, 15, 17, 19, 21, 23, 25, 27, 29, 31, 33, 35, 37, 39, 41, 43, 45, 47, 49, 51, 53, 55, 57, 59, 61, 63, 65, 67, 69, 71, 73, 75, 77, 79, 81, 83, 85, 87, 89, 91, 93, 95, 97, 99, 101, 103, 105, 107, 109, 111, 113, 115, 117, 119, 121, 123, 125, 127, 129, 131, 133, 135, 137, 139, 141 or 143, or of a naturally occurring allelic variant or mutant of SEQ ID NO:1, 3, 5, 7, 9, 11, 13, 15, 17, 19, 21, 23, 25, 27, 29, 31, 33, 35, 37, 39, 41, 43, 45, 47, 49, 51, 53, 55, 57, 59, 61, 63, 65, 67, 69, 71, 73, 75, 77, 79, 81, 83, 85, 87, 89, 91, 93, 95, 97, 99, 101, 103, 105, 107, 109, 111, 113, 115, 117, 119, 121, 123, 125, 127, 129, 131, 133, 135, 137, 139, 141 or 143. In one embodiment, a nucleic acid molecule used in the methods of the present invention comprises a nucleotide sequence which is greater than 100, 100-200, 200-300, 300-400, 400-500, 500-600, 600-700, 700-800, 800-900, 900-1000, 1000-1100, 1100-1200, 1200-1300, or more nucleotides in length and hybridizes under stringent hybridization conditions to a nucleic acid molecule of SEQ ID NO:1, 3, 5, 7, 9, 11, 13, 15, 17, 19, 21, 23, 25, 27, 29, 31, 33, 35, 37, 39, 41, 43, 45, 47, 49, 51, 53, 55, 57, 59, 61, 63, 65, 67, 69, 71, 73, 75, 77, 79, 81, 83, 85, 87, 89, 91, 93, 95, 97, 99, 101, 103, 105, 107, 109, 111, 113, 115, 117, 119, 121, 123, 125, 127, 129, 131, 133, 135, 137, 139, 141 or 143.

[1012] As used herein, the term “hybridizes under stringent conditions” is intended to describe conditions for hybridization and washing under which nucleotide sequences that are significantly identical or homologous to each other remain hybridized to each other. Preferably, the conditions are such that sequences at least about 70%, more preferably at least about 80%, even more preferably at least about 85% or 90% identical to each other remain hybridized to each other. Such stringent conditions are known to those skilled in the art and can be found in Current Protocols in Molecular Biology, Ausubel et al., eds., John Wiley & Sons, Inc. (1995), sections 2, 4 and 6. Additional stringent conditions can be found in Molecular Cloning: A Laboratory Manual, Sambrook et al., Cold Spring Harbor Press, Cold Spring Harbor, N.Y. (1989), chapters 7, 9 and 11. A preferred, non-limiting example of stringent hybridization conditions includes hybridization in 4× sodium chloride/sodium citrate (SSC), at about 65-70° C. (or hybridization in 4×SSC plus 50% formamide at about 42-50° C.) followed by one or more washes in 1×SSC, at about 65-70° C. A preferred, non-limiting example of highly stringent hybridization conditions includes hybridization in 1×SSC, at about 65-70° C. (or hybridization in 1×SSC plus 50% formamide at about 42-50° C.) followed by one or more washes in 0.3×SSC, at about 65-70° C. A preferred, non-limiting example of reduced stringency hybridization conditions includes hybridization in 4×SSC, at about 50-60° C. (or alternatively hybridization in 6×SSC plus 50% formamide at about 40-45° C.) followed by one or more washes in 2×SSC, at about 50-60° C. Ranges intermediate to the above-recited values, e.g., at 65-70° C. or at 42-50° C. are also intended to be encompassed by the present invention. SSPE (1×SSPE is 0.15M NaCl, 10 mM NaH₂PO₄, and 1.25 mM EDTA, pH 7.4) can be substituted for SSC (1×SSC is 0.15M NaCl and 15 mM sodium citrate) in the hybridization and wash buffers; washes are performed for 15 minutes each after hybridization is complete. The hybridization temperature for hybrids anticipated to be less than 50 base pairs in length should be 5-10° C. less than the melting temperature (Tₘ) of the hybrid, where Tₘ is determined according to the following equations. For hybrids less than 18 base pairs in length, Tₘ(° C.)=2(# of A+T bases)+4(# of G+C bases). For hybrids between 18 and 49 base pairs in length, Tₘ(° C.)=81.5+16.6(log₁₀[Na⁺])+0.41(% G+C)−(600/N), where N is the number of bases in the hybrid, and [Na+] is the concentration of sodium ions in the hybridization buffer ([Na⁺] for 1×SSC=0.165 M). It will also be recognized by the skilled practitioner that additional reagents may be added to hybridization and/or wash buffers to decrease non-specific hybridization of nucleic acid molecules to membranes, for example, nitrocellulose or nylon membranes, including but not limited to blocking agents (e.g., BSA or salmon or herring sperm carrier DNA), detergents (e.g., SDS), chelating agents (e.g., EDTA), Ficoll, PVP and the like. When using nylon membranes, in particular, an additional preferred, non-limiting example of stringent hybridization conditions is hybridization in 0.25-0.5M NaH₂PO₄, 7% SDS at about 65° C., followed by one or more washes at 0.02M NaH₂PO₄, 1% SDS at 65° C., see e.g., Church and Gilbert (1984) Proc. Natl. Acad. Sci. USA 81:1991-1995, (or alternatively 0.2×SSC, 1% SDS).

[1013] In preferred embodiments, the probe further comprises a label group attached thereto, e.g., the label group can be a radioisotope, a fluorescent compound, an enzyme, or an enzyme co-factor. Such probes can be used as a part of a diagnostic test kit for identifying cells or tissue which misexpress a 15986, 2188, 20743, 9148, 9151, 9791, 44252, 14184, 42461, 8204, 7970, 25552, 21657, 26492, 2411, 15088, 1905, 28899, 63380, 33935, 10480, 12686, 25501, 17694, 15701, 53062, 49908, 21612, 38949, 6216, 46863, 9235, 2201, 6985, 9883, 12238, 18057, 21617, 39228, 49928, 54476, 62113, 64316, 12264, 32362, 58198, 2887, 3205, 8557, 9600, 9693, 44867, 53058, 55556, 57658, 2208, 10252, 10302, 14218, 33877, 10317, 10485, 25964, 14815, 1363, 1397, 14827, 21708, 3801, 64698, 2179 or 13249 protein, such as by measuring a level of a 15986, 2188, 20743, 9148, 9151, 9791, 44252, 14184, 42461, 8204, 7970, 25552, 21657, 26492, 2411, 15088, 1905, 28899, 63380, 33935, 10480, 12686, 25501, 17694, 15701, 53062, 49908, 21612, 38949, 6216, 46863, 9235, 2201, 6985, 9883, 12238, 18057, 21617, 39228, 49928, 54476, 62113, 64316, 12264, 32362, 58198, 2887, 3205, 8557, 9600, 9693, 44867, 53058, 55556, 57658, 2208, 10252, 10302, 14218, 33877, 10317, 10485, 25964, 14815, 1363, 1397, 14827, 21708, 3801, 64698, 2179 or 13249-encoding nucleic acid in a sample of cells from a subject e.g., detecting 15986, 2188, 20743, 9148, 9151, 9791, 44252, 14184, 42461, 8204, 7970, 25552, 21657, 26492, 2411, 15088, 1905, 28899, 63380, 33935, 10480, 12686, 25501, 17694, 15701, 53062, 49908, 21612, 38949, 6216, 46863, 9235, 2201, 6985, 9883, 12238, 18057, 21617, 39228, 49928, 54476, 62113, 64316, 12264, 32362, 58198, 2887, 3205, 8557, 9600, 9693, 44867, 53058, 55556, 57658, 2208, 10252, 10302, 14218, 33877, 10317, 10485, 25964, 14815, 1363, 1397, 14827, 21708, 3801, 64698, 2179 or 13249 mRNA levels or determining whether a genomic 15986, 2188, 20743, 9148, 9151, 9791, 44252, 14184, 42461, 8204, 7970, 25552, 21657, 26492, 2411, 15088, 1905, 28899, 63380, 33935, 10480, 12686, 25501, 17694, 15701, 53062, 49908, 21612, 38949, 6216, 46863, 9235, 2201, 6985, 9883, 12238, 18057, 21617, 39228, 49928, 54476, 62113, 64316, 12264, 32362, 58198, 2887, 3205, 8557, 9600, 9693, 44867, 53058, 55556, 57658, 2208, 10252, 10302, 14218, 33877, 10317, 10485, 25964, 14815, 1363, 1397, 14827, 21708, 3801, 64698, 2179 or 13249 gene has been mutated or deleted.

[1014] The methods of the invention further encompass the use of nucleic acid molecules that differ from the nucleotide sequence shown in SEQ ID NO:1, 3, 5, 7, 9, 11, 13, 15, 17, 19, 21, 23, 25, 27, 29, 31, 33, 35, 37, 39, 41, 43, 45, 47, 49, 51, 53, 55, 57, 59, 61, 63, 65, 67, 69, 71, 73, 75, 77, 79, 81, 83, 85, 87, 89, 91, 93, 95, 97, 99, 101, 103, 105, 107, 109, 111, 113, 115, 117, 119, 121, 123, 125, 127, 129, 131, 133, 135, 137, 139, 141 or 143, due to degeneracy of the genetic code and thus encode the same 15986, 2188, 20743, 9148, 9151, 9791, 44252, 14184, 42461, 8204, 7970, 25552, 21657, 26492, 2411, 15088, 1905, 28899, 63380, 33935, 10480, 12686, 25501, 17694, 15701, 53062, 49908, 21612, 38949, 6216, 46863, 9235, 2201, 6985, 9883, 12238, 18057, 21617, 39228, 49928, 54476, 62113, 64316, 12264, 32362, 58198, 2887, 3205, 8557, 9600, 9693, 44867, 53058, 55556, 57658, 2208, 10252, 10302, 14218, 33877, 10317, 10485, 25964, 14815, 1363, 1397, 14827, 21708, 3801, 64698, 2179 or 13249 proteins as those encoded by the nucleotide sequence shown in SEQ ID NO:1, 3, 5, 7, 9, 11, 13, 15, 17, 19, 21, 23, 25, 27, 29, 31, 33, 35, 37, 39, 41, 43, 45, 47, 49, 51, 53, 55, 57, 59, 61, 63, 65, 67, 69, 71, 73, 75, 77, 79, 81, 83, 85, 87, 89, 91, 93, 95, 97, 99, 101, 103, 105, 107, 109, 111, 113, 115, 117, 119, 121, 123, 125, 127, 129, 131, 133, 135, 137, 139, 141 or 143. In another embodiment, an isolated nucleic acid molecule included in the methods of the invention has a nucleotide sequence encoding a protein having an amino acid sequence shown in SEQ ID NO:2, 4, 6, 8, 10, 12, 14, 16, 18, 20, 22, 24, 26, 28, 30, 32, 34, 36, 38, 40, 42, 44, 46, 48, 50, 52, 54, 56, 58, 60, 62, 64, 66, 68, 70, 72, 74, 76, 78, 80, 82, 84, 86, 88, 90, 92, 94, 96, 98, 100, 102, 104, 106, 108, 110, 112, 114, 116, 118, 120, 122, 124, 126, 128, 130, 132, 134, 136, 138, 140, 142 or 144.

[1015] The methods of the invention further include the use of allelic variants of human 15986, 2188, 20743, 9148, 9151, 9791, 44252, 14184, 42461, 8204, 7970, 25552, 21657, 26492, 2411, 15088, 1905, 28899, 63380, 33935, 10480, 12686, 25501, 17694, 15701, 53062, 49908, 21612, 38949, 6216, 46863, 9235, 2201, 6985, 9883, 12238, 18057, 21617, 39228, 49928, 54476, 62113, 64316, 12264, 32362, 58198, 2887, 3205, 8557, 9600, 9693, 44867, 53058, 55556, 57658, 2208, 10252, 10302, 14218, 33877, 10317, 10485, 25964, 14815, 1363, 1397, 14827, 21708, 3801, 64698, 2179 or 13249, e.g., functional and non-functional allelic variants. Functional allelic variants are naturally occurring amino acid sequence variants of the human 15986, 2188, 20743, 9148, 9151, 9791, 44252, 14184, 42461, 8204, 7970, 25552, 21657, 26492, 2411, 15088, 1905, 28899, 63380, 33935, 10480, 12686, 25501, 17694, 15701, 53062, 49908, 21612, 38949, 6216, 46863, 9235, 2201, 6985, 9883, 12238, 18057, 21617, 39228, 49928, 54476, 62113, 64316, 12264, 32362, 58198, 2887, 3205, 8557, 9600, 9693, 44867, 53058, 55556, 57658, 2208, 10252, 10302, 14218, 33877, 10317, 10485, 25964, 14815, 1363, 1397, 14827, 21708, 3801, 64698, 2179 or 13249 protein that maintain a 15986, 2188, 20743, 9148, 9151, 9791, 44252, 14184, 42461, 8204, 7970, 25552, 21657, 26492, 2411, 15088, 1905, 28899, 63380, 33935, 10480, 12686, 25501, 17694, 15701, 53062, 49908, 21612, 38949, 6216, 46863, 9235, 2201, 6985, 9883, 12238, 18057, 21617, 39228, 49928, 54476, 62113, 64316, 12264, 32362, 58198, 2887, 3205, 8557, 9600, 9693, 44867, 53058, 55556, 57658, 2208, 10252, 10302, 14218, 33877, 10317, 10485, 25964, 14815, 1363, 1397, 14827, 21708, 3801, 64698, 2179 or 13249 activity. Functional allelic variants will typically contain only conservative substitution of one or more amino acids of SEQ ID NO:2, 4, 6, 8, 10, 12, 14, 16, 18, 20, 22, 24, 26, 28, 30, 32, 34, 36, 38, 40, 42, 44, 46, 48, 50, 52, 54, 56, 58, 60, 62, 64, 66, 68, 70, 72, 74, 76, 78, 80, 82, 84, 86, 88, 90, 92, 94, 96, 98, 100, 102, 104, 106, 108, 110, 112, 114, 116, 118, 120, 122, 124, 126, 128, 130, 132, 134, 136, 138, 140, 142 or 144, or substitution, deletion or insertion of non-critical residues in non-critical regions of the protein.

[1016] Non-functional allelic variants are naturally occurring amino acid sequence variants of the human 15986, 2188, 20743, 9148, 9151, 9791, 44252, 14184, 42461, 8204, 7970, 25552, 21657, 26492, 2411, 15088, 1905, 28899, 63380, 33935, 10480, 12686, 25501, 17694, 15701, 53062, 49908, 21612, 38949, 6216, 46863, 9235, 2201, 6985, 9883, 12238, 18057, 21617, 39228, 49928, 54476, 62113, 64316, 12264, 32362, 58198, 2887, 3205, 8557, 9600, 9693, 44867, 53058, 55556, 57658, 2208, 10252, 10302, 14218, 33877, 10317, 10485, 25964, 14815, 1363, 1397, 14827, 21708, 3801, 64698, 2179 or 13249 protein that do not have a 15986, 2188, 20743, 9148, 9151, 9791, 44252, 14184, 42461, 8204, 7970, 25552, 21657, 26492, 2411, 15088, 1905, 28899, 63380, 33935, 10480, 12686, 25501, 17694, 15701, 53062, 49908, 21612, 38949, 6216, 46863, 9235, 2201, 6985, 9883, 12238, 18057, 21617, 39228, 49928, 54476, 62113, 64316, 12264, 32362, 58198, 2887, 3205, 8557, 9600, 9693, 44867, 53058, 55556, 57658, 2208, 10252, 10302, 14218, 33877, 10317, 10485, 25964, 14815, 1363, 1397, 14827, 21708, 3801, 64698, 2179 or 13249 activity. Non-functional allelic variants will typically contain a non-conservative substitution, deletion, or insertion or premature truncation of the amino acid sequence of SEQ ID NO:2, 4, 6, 8, 10, 12, 14, 16, 18, 20, 22, 24, 26, 28, 30, 32, 34, 36, 38, 40, 42, 44, 46, 48, 50, 52, 54, 56, 58, 60, 62, 64, 66, 68, 70, 72, 74, 76, 78, 80, 82, 84, 86, 88, 90, 92, 94, 96, 98, 100, 102, 104, 106, 108, 110, 112, 114, 116, 118, 120, 122, 124, 126, 128, 130, 132, 134, 136, 138, 140, 142 or 144 or a substitution, insertion or deletion in critical residues or critical regions of the protein.

[1017] The methods of the present invention may further use non-human orthologues of the human 15986, 2188, 20743, 9148, 9151, 9791, 44252, 14184, 42461, 8204, 7970, 25552, 21657, 26492, 2411, 15088, 1905, 28899, 63380, 33935, 10480, 12686, 25501, 17694, 15701, 53062, 49908, 21612, 38949, 6216, 46863, 9235, 2201, 6985, 9883, 12238, 18057, 21617, 39228, 49928, 54476, 62113, 64316, 12264, 32362, 58198, 2887, 3205, 8557, 9600, 9693, 44867, 53058, 55556, 57658, 2208, 10252, 10302, 14218, 33877, 10317, 10485, 25964, 14815, 1363, 1397, 14827, 21708, 3801, 64698, 2179 or 13249 protein. Orthologues of the human 15986, 2188, 20743, 9148, 9151, 9791, 44252, 14184, 42461, 8204, 7970, 25552, 21657, 26492, 2411, 15088, 1905, 28899, 63380, 33935, 10480, 12686, 25501, 17694, 15701, 53062, 49908, 21612, 38949, 6216, 46863, 9235, 2201, 6985, 9883, 12238, 18057, 21617, 39228, 49928, 54476, 62113, 64316, 12264, 32362, 58198, 2887, 3205, 8557, 9600, 9693, 44867, 53058, 55556, 57658, 2208, 10252, 10302, 14218, 33877, 10317, 10485, 25964, 14815, 1363, 1397, 14827, 21708, 3801, 64698, 2179 or 13249 protein are proteins that are isolated from non-human organisms and possess the same 15986, 2188, 20743, 9148, 9151, 9791, 44252, 14184, 42461, 8204, 7970, 25552, 21657, 26492, 2411, 15088, 1905, 28899, 63380, 33935, 10480, 12686, 25501, 17694, 15701, 53062, 49908, 21612, 38949, 6216, 46863, 9235, 2201, 6985, 9883, 12238, 18057, 21617, 39228, 49928, 54476, 62113, 64316, 12264, 32362, 58198, 2887, 3205, 8557, 9600, 9693, 44867, 53058, 55556, 57658, 2208, 10252, 10302, 14218, 33877, 10317, 10485, 25964, 14815, 1363, 1397, 14827, 21708, 3801, 64698, 2179 or 13249 activity.

[1018] The methods of the present invention further include the use of nucleic acid molecules comprising the nucleotide sequence of SEQ ID NO:1, 3, 5, 7, 9, 11, 13, 15, 17, 19, 21, 23, 25, 27, 29, 31, 33, 35, 37, 39, 41, 43, 45, 47, 49, 51, 53, 55, 57, 59, 61, 63, 65, 67, 69, 71, 73, 75, 77, 79, 81, 83, 85, 87, 89, 91, 93, 95, 97, 99, 101, 103, 105, 107, 109, 111, 113, 115, 117, 119, 121, 123, 125, 127, 129, 131, 133, 135, 137, 139, 141 or 143 or a portion thereof, in which a mutation has been introduced. The mutation may lead to amino acid substitutions at “non-essential” amino acid residues or at “essential” amino acid residues. A “non-essential” amino acid residue is a residue that can be altered from the wild-type sequence of 15986, 2188, 20743, 9148, 9151, 9791, 44252, 14184, 42461, 8204, 7970, 25552, 21657, 26492, 2411, 15088, 1905, 28899, 63380, 33935, 10480, 12686, 25501, 17694, 15701, 53062, 49908, 21612, 38949, 6216, 46863, 9235, 2201, 6985, 9883, 12238, 18057, 21617, 39228, 49928, 54476, 62113, 64316, 12264, 32362, 58198, 2887, 3205, 8557, 9600, 9693, 44867, 53058, 55556, 57658, 2208, 10252, 10302, 14218, 33877, 10317, 10485, 25964, 14815, 1363, 1397, 14827, 21708, 3801, 64698, 2179 or 13249 (e.g., the sequence of SEQ ID NO:2, 4, 6, 8, 10, 12, 14, 16, 18, 20, 22, 24, 26, 28, 30, 32, 34, 36, 38, 40, 42, 44, 46, 48, 50, 52, 54, 56, 58, 60, 62, 64, 66, 68, 70, 72, 74, 76, 78, 80, 82, 84, 86, 88, 90, 92, 94, 96, 98, 100, 102, 104, 106, 108, 110, 112, 114, 116, 118, 120, 122, 124, 126, 128, 130, 132, 134, 136, 138, 140, 142 or 144) without altering the biological activity, whereas an “essential” amino acid residue is required for biological activity. For example, amino acid residues that are conserved among the 15986, 2188, 20743, 9148, 9151, 9791, 44252, 14184, 42461, 8204, 7970, 25552, 21657, 26492, 2411, 15088, 1905, 28899, 63380, 33935, 10480, 12686, 25501, 17694, 15701, 53062, 49908, 21612, 38949, 6216, 46863, 9235, 2201, 6985, 9883, 12238, 18057, 21617, 39228, 49928, 54476, 62113, 64316, 12264, 32362, 58198, 2887, 3205, 8557, 9600, 9693, 44867, 53058, 55556, 57658, 2208, 10252, 10302, 14218, 33877, 10317, 10485, 25964, 14815, 1363, 1397, 14827, 21708, 3801, 64698, 2179 or 13249 proteins of the present invention are not likely to be amenable to alteration.

[1019] Mutations can be introduced into SEQ ID NO:1, 3, 5, 7, 9, 11, 13, 15, 17, 19, 21, 23, 25, 27, 29, 31, 33, 35, 37, 39, 41, 43, 45, 47, 49, 51, 53, 55, 57, 59, 61, 63, 65, 67, 69, 71, 73, 75, 77, 79, 81, 83, 85, 87, 89, 91, 93, 95, 97, 99, 101, 103, 105, 107, 109, 111, 113, 115, 117, 119, 121, 123, 125, 127, 129, 131, 133, 135, 137, 139, 141 or 143, by standard techniques, such as site-directed mutagenesis and PCR-mediated mutagenesis. Preferably, conservative amino acid substitutions are made at one or more predicted non-essential amino acid residues. A “conservative amino acid substitution” is one in which the amino acid residue is replaced with an amino acid residue having a similar side chain. Families of amino acid residues having similar side chains have been defined in the art. These families include amino acids with basic side chains (e.g., lysine, arginine, histidine), acidic side chains (e.g., aspartic acid, glutamic acid), uncharged polar side chains (e.g., asparagine, glutamine, serine, threonine, tyrosine, cysteine), nonpolar side chains (e.g., glycine, alanine, valine, leucine, isoleucine, proline, phenylalanine, methionine, tryptophan), beta-branched side chains (e.g., threonine, valine, isoleucine) and aromatic side chains (e.g., tyrosine, phenylalanine, tryptophan, histidine). Thus, a predicted nonessential amino acid residue in a 15986, 2188, 20743, 9148, 9151, 9791, 44252, 14184, 42461, 8204, 7970, 25552, 21657, 26492, 2411, 15088, 1905, 28899, 63380, 33935, 10480, 12686, 25501, 17694, 15701, 53062, 49908, 21612, 38949, 6216, 46863, 9235, 2201, 6985, 9883, 12238, 18057, 21617, 39228, 49928, 54476, 62113, 64316, 12264, 32362, 58198, 2887, 3205, 8557, 9600, 9693, 44867, 53058, 55556, 57658, 2208, 10252, 10302, 14218, 33877, 10317, 10485, 25964, 14815, 1363, 1397, 14827, 21708, 3801, 64698, 2179 or 13249 protein is preferably replaced with another amino acid residue from the same side chain family. Alternatively, in another embodiment, mutations can be introduced randomly along all or part of a 15986, 2188, 20743, 9148, 9151, 9791, 44252, 14184, 42461, 8204, 7970, 25552, 21657, 26492, 2411, 15088, 1905, 28899, 63380, 33935, 10480, 12686, 25501, 17694, 15701, 53062, 49908, 21612, 38949, 6216, 46863, 9235, 2201, 6985, 9883, 12238, 18057, 21617, 39228, 49928, 54476, 62113, 64316, 12264, 32362, 58198, 2887, 3205, 8557, 9600, 9693, 44867, 53058, 55556, 57658, 2208, 10252, 10302, 14218, 33877, 10317, 10485, 25964, 14815, 1363, 1397, 14827, 21708, 3801, 64698, 2179 or 13249 coding sequence, such as by saturation mutagenesis, and the resultant mutants can be screened for 15986, 2188, 20743, 9148, 9151, 9791, 44252, 14184, 42461, 8204, 7970, 25552, 21657, 26492, 2411, 15088, 1905, 28899, 63380, 33935, 10480, 12686, 25501, 17694, 15701, 53062, 49908, 21612, 38949, 6216, 46863, 9235, 2201, 6985, 9883, 12238, 18057, 21617, 39228, 49928, 54476, 62113, 64316, 12264, 32362, 58198, 2887, 3205, 8557, 9600, 9693, 44867, 53058, 55556, 57658, 2208, 10252, 10302, 14218, 33877, 10317, 10485, 25964, 14815, 1363, 1397, 14827, 21708, 3801, 64698, 2179 or 13249 biological activity to identify mutants that retain activity. Following mutagenesis of SEQ ID NO:1, 3, 5, 7, 9, 11, 13, 15, 17, 19, 21, 23, 25, 27, 29, 31, 33, 35, 37, 39, 41, 43, 45, 47, 49, 51, 53, 55, 57, 59, 61, 63, 65, 67, 69, 71, 73, 75, 77, 79, 81, 83, 85, 87, 89, 91, 93, 95, 97, 99, 101, 103, 105, 107, 109, 111, 113, 115, 117, 119, 121, 123, 125, 127, 129, 131, 133, 135, 137, 139, 141 or 143, the encoded protein can be expressed recombinantly and the activity of the protein can be determined using the assay described herein.

[1020] Another aspect of the invention pertains to the use of isolated nucleic acid molecules which are antisense to the nucleotide sequence of SEQ ID NO:1, 3, 5, 7, 9, 11, 13, 15, 17, 19, 21, 23, 25, 27, 29, 31, 33, 35, 37, 39, 41, 43, 45, 47, 49, 51, 53, 55, 57, 59, 61, 63, 65, 67, 69, 71, 73, 75, 77, 79, 81, 83, 85, 87, 89, 91, 93, 95, 97, 99, 101, 103, 105, 107, 109, 111, 113, 115, 117, 119, 121, 123, 125, 127, 129, 131, 133, 135, 137, 139, 141 or 143. An “antisense” nucleic acid comprises a nucleotide sequence which is complementary to a “sense” nucleic acid encoding a protein, e.g., complementary to the coding strand of a double-stranded cDNA molecule or complementary to an mRNA sequence. Accordingly, an antisense nucleic acid can hydrogen bond to a sense nucleic acid. The antisense nucleic acid can be complementary to an entire 15986, 2188, 20743, 9148, 9151, 9791, 44252, 14184, 42461, 8204, 7970, 25552, 21657, 26492, 2411, 15088, 1905, 28899, 63380, 33935, 10480, 12686, 25501, 17694, 15701, 53062, 49908, 21612, 38949, 6216, 46863, 9235, 2201, 6985, 9883, 12238, 18057, 21617, 39228, 49928, 54476, 62113, 64316, 12264, 32362, 58198, 2887, 3205, 8557, 9600, 9693, 44867, 53058, 55556, 57658, 2208, 10252, 10302, 14218, 33877, 10317, 10485, 25964, 14815, 1363, 1397, 14827, 21708, 3801, 64698, 2179 or 13249 coding strand, or to only a portion thereof. In one embodiment, an antisense nucleic acid molecule is antisense to a “coding region” of the coding strand of a nucleotide sequence encoding a 15986, 2188, 20743, 9148, 9151, 9791, 44252, 14184, 42461, 8204, 7970, 25552, 21657, 26492, 2411, 15088, 1905, 28899, 63380, 33935, 10480, 12686, 25501, 17694, 15701, 53062, 49908, 21612, 38949, 6216, 46863, 9235, 2201, 6985, 9883, 12238, 18057, 21617, 39228, 49928, 54476, 62113, 64316, 12264, 32362, 58198, 2887, 3205, 8557, 9600, 9693, 44867, 53058, 55556, 57658, 2208, 10252, 10302, 14218, 33877, 10317, 10485, 25964, 14815, 1363, 1397, 14827, 21708, 3801, 64698, 2179 or 13249. The term “coding region” refers to the region of the nucleotide sequence comprising codons which are translated into amino acid residues. In another embodiment, the antisense nucleic acid molecule is antisense to a “noncoding region” of the coding strand of a nucleotide sequence encoding 15986, 2188, 20743, 9148, 9151, 9791, 44252, 14184, 42461, 8204, 7970, 25552, 21657, 26492, 2411, 15088, 1905, 28899, 63380, 33935, 10480, 12686, 25501, 17694, 15701, 53062, 49908, 21612, 38949, 6216, 46863, 9235, 2201, 6985, 9883, 12238, 18057, 21617, 39228, 49928, 54476, 62113, 64316, 12264, 32362, 58198, 2887, 3205, 8557, 9600, 9693, 44867, 53058, 55556, 57658, 2208, 10252, 10302, 14218, 33877, 10317, 10485, 25964, 14815, 1363, 1397, 14827, 21708, 3801, 64698, 2179 or 13249. The term “noncoding region” refers to 5′ and 3′ sequences which flank the coding region that are not translated into amino acids (also referred to as 5′ and 3′ untranslated regions).

[1021] Given the coding strand sequences encoding 15986, 2188, 20743, 9148, 9151, 9791, 44252, 14184, 42461, 8204, 7970, 25552, 21657, 26492, 2411, 15088, 1905, 28899, 63380, 33935, 10480, 12686, 25501, 17694, 15701, 53062, 49908, 21612, 38949, 6216, 46863, 9235, 2201, 6985, 9883, 12238, 18057, 21617, 39228, 49928, 54476, 62113, 64316, 12264, 32362, 58198, 2887, 3205, 8557, 9600, 9693, 44867, 53058, 55556, 57658, 2208, 10252, 10302, 14218, 33877, 10317, 10485, 25964, 14815, 1363, 1397, 14827, 21708, 3801, 64698, 2179 or 13249 disclosed herein, antisense nucleic acids of the invention can be designed according to the rules of Watson and Crick base pairing. The antisense nucleic acid molecule can be complementary to the entire coding region of 15986, 2188, 20743, 9148, 9151, 9791, 44252, 14184, 42461, 8204, 7970, 25552, 21657, 26492, 2411, 15088, 1905, 28899, 63380, 33935, 10480, 12686, 25501, 17694, 15701, 53062, 49908, 21612, 38949, 6216, 46863, 9235, 2201, 6985, 9883, 12238, 18057, 21617, 39228, 49928, 54476, 62113, 64316, 12264, 32362, 58198, 2887, 3205, 8557, 9600, 9693, 44867, 53058, 55556, 57658, 2208, 10252, 10302, 14218, 33877, 10317, 10485, 25964, 14815, 1363, 1397, 14827, 21708, 3801, 64698, 2179 or 13249 mRNA, but more preferably is an oligonucleotide which is antisense to only a portion of the coding or noncoding region of 15986, 2188, 20743, 9148, 9151, 9791, 44252, 14184, 42461, 8204, 7970, 25552, 21657, 26492, 2411, 15088, 1905, 28899, 63380, 33935, 10480, 12686, 25501, 17694, 15701, 53062, 49908, 21612, 38949, 6216, 46863, 9235, 2201, 6985, 9883, 12238, 18057, 21617, 39228, 49928, 54476, 62113, 64316, 12264, 32362, 58198, 2887, 3205, 8557, 9600, 9693, 44867, 53058, 55556, 57658, 2208, 10252, 10302, 14218, 33877, 10317, 10485, 25964, 14815, 1363, 1397, 14827, 21708, 3801, 64698, 2179 or 13249 mRNA. For example, the antisense oligonucleotide can be complementary to the region surrounding the translation start site of 15986, 2188, 20743, 9148, 9151, 9791, 44252, 14184, 42461, 8204, 7970, 25552, 21657, 26492, 2411, 15088, 1905, 28899, 63380, 33935, 10480, 12686, 25501, 17694, 15701, 53062, 49908, 21612, 38949, 6216, 46863, 9235, 2201, 6985, 9883, 12238, 18057, 21617, 39228, 49928, 54476, 62113, 64316, 12264, 32362, 58198, 2887, 3205, 8557, 9600, 9693, 44867, 53058, 55556, 57658, 2208, 10252, 10302, 14218, 33877, 10317, 10485, 25964, 14815, 1363, 1397, 14827, 21708, 3801, 64698, 2179 or 13249 mRNA. An antisense oligonucleotide can be, for example, about 5, 10, 15, 20, 25, 30, 35, 40, 45 or 50 nucleotides in length. An antisense nucleic acid of the invention can be constructed using chemical synthesis and enzymatic ligation reactions using procedures known in the art. For example, an antisense nucleic acid (e.g., an antisense oligonucleotide) can be chemically synthesized using naturally occurring nucleotides or variously modified nucleotides designed to increase the biological stability of the molecules or to increase the physical stability of the duplex formed between the antisense and sense nucleic acids, e.g., phosphorothioate derivatives and acridine substituted nucleotides can be used. Examples of modified nucleotides which can be used to generate the antisense nucleic acid include 5-fluorouracil, 5-bromouracil, 5-chlorouracil, 5-iodouracil, hypoxanthine, xantine, 4-acetylcytosine, 5-(carboxyhydroxylmethyl) uracil, 5-carboxymethylaminomethyl-2-thiouridine, 5-carboxymethylaminomethyluracil, dihydrouracil, beta-D-galactosylqueosine, inosine, N6-isopentenyladenine, 1-methylguanine, 1-methylinosine, 2,2-dimethylguanine, 2-methyladenine, 2-methylguanine, 3-methylcytosine, 5-methylcytosine, N6-adenine, 7-methylguanine, 5-methylaminomethyluracil, 5-methoxyaminomethyl-2-thiouracil, beta-D-mannosylqueosine, 5′-methoxycarboxymethyluracil, 5-methoxyuracil, 2-methylthio-N-6-isopentenyladenine, uracil-5-oxyacetic acid (v), wybutoxosine, pseudouracil, queosine, 2-thiocytosine, 5-methyl-2-thiouracil, 2-thiouracil, 4-thiouracil, 5-methyluracil, uracil-5-oxyacetic acid methylester, uracil-5-oxyacetic acid (v), 5-methyl-2-thiouracil, 3-(3-amino-3-N-2-carboxypropyl) uracil, (acp3)w, and 2,6-diaminopurine. Alternatively, the antisense nucleic acid can be produced biologically using an expression vector into which a nucleic acid has been subcloned in an antisense orientation (i.e., RNA transcribed from the inserted nucleic acid will be of an antisense orientation to a target nucleic acid of interest). Antisense nucleic acid molecules used in the methods of the invention are further described above.

[1022] In yet another embodiment, the 15986, 2188, 20743, 9148, 9151, 9791, 44252, 14184, 42461, 8204, 7970, 25552, 21657, 26492, 2411, 15088, 1905, 28899, 63380, 33935, 10480, 12686, 25501, 17694, 15701, 53062, 49908, 21612, 38949, 6216, 46863, 9235, 2201, 6985, 9883, 12238, 18057, 21617, 39228, 49928, 54476, 62113, 64316, 12264, 32362, 58198, 2887, 3205, 8557, 9600, 9693, 44867, 53058, 55556, 57658, 2208, 10252, 10302, 14218, 33877, 10317, 10485, 25964, 14815, 1363, 1397, 14827, 21708, 3801, 64698, 2179 or 13249 nucleic acid molecules used in the methods of the present invention can be modified at the base moiety, sugar moiety or phosphate backbone to improve, e.g., the stability, hybridization, or solubility of the molecule. For example, the deoxyribose phosphate backbone of the nucleic acid molecules can be modified to generate peptide nucleic acids (see Hyrup B. et al. (1996) Bioorganic & Medicinal Chemistry 4 (1): 5-23). As used herein, the terms “peptide nucleic acids” or “PNAs” refer to nucleic acid mimics, e.g., DNA mimics, in which the deoxyribose phosphate backbone is replaced by a pseudopeptide backbone and only the four natural nucleobases are retained. The neutral backbone of PNAs has been shown to allow for specific hybridization to DNA and RNA under conditions of low ionic strength. The synthesis of PNA oligomers can be performed using standard solid phase peptide synthesis protocols as described in Hyrup B. et al. (1996) supra; Perry-O'Keefe et al. (1996) Proc. Natl. Acad. Sci. 93:14670-675.

[1023] PNAs of 15986, 2188, 20743, 9148, 9151, 9791, 44252, 14184, 42461, 8204, 7970, 25552, 21657, 26492, 2411, 15088, 1905, 28899, 63380, 33935, 10480, 12686, 25501, 17694, 15701, 53062, 49908, 21612, 38949, 6216, 46863, 9235, 2201, 6985, 9883, 12238, 18057, 21617, 39228, 49928, 54476, 62113, 64316, 12264, 32362, 58198, 2887, 3205, 8557, 9600, 9693, 44867, 53058, 55556, 57658, 2208, 10252, 10302, 14218, 33877, 10317, 10485, 25964, 14815, 1363, 1397, 14827, 21708, 3801, 64698, 2179 or 13249 nucleic acid molecules can be used in the therapeutic and diagnostic applications described herein. For example, PNAs can be used as antisense or antigene agents for sequence-specific modulation of gene expression by, for example, inducing transcription or translation arrest or inhibiting replication. PNAs of 15986, 2188, 20743, 9148, 9151, 9791, 44252, 14184, 42461, 8204, 7970, 25552, 21657, 26492, 2411, 15088, 1905, 28899, 63380, 33935, 10480, 12686, 25501, 17694, 15701, 53062, 49908, 21612, 38949, 6216, 46863, 9235, 2201, 6985, 9883, 12238, 18057, 21617, 39228, 49928, 54476, 62113, 64316, 12264, 32362, 58198, 2887, 3205, 8557, 9600, 9693, 44867, 53058, 55556, 57658, 2208, 10252, 10302, 14218, 33877, 10317, 10485, 25964, 14815, 1363, 1397, 14827, 21708, 3801, 64698, 2179 or 13249 nucleic acid molecules can also be used in the analysis of single base pair mutations in a gene, (e.g., by PNA-directed PCR clamping); as ‘artificial restriction enzymes’ when used in combination with other enzymes, (e.g., S1 nucleases (Hyrup B. et al. (1996) supra)); or as probes or primers for DNA sequencing or hybridization (Hyrup B. et al. (1996) supra; Perry-O'Keefe et al. (1996) supra).

[1024] In another embodiment, PNAs of 15986, 2188, 20743, 9148, 9151, 9791, 44252, 14184, 42461, 8204, 7970, 25552, 21657, 26492, 2411, 15088, 1905, 28899, 63380, 33935, 10480, 12686, 25501, 17694, 15701, 53062, 49908, 21612, 38949, 6216, 46863, 9235, 2201, 6985, 9883, 12238, 18057, 21617, 39228, 49928, 54476, 62113, 64316, 12264, 32362, 58198, 2887, 3205, 8557, 9600, 9693, 44867, 53058, 55556, 57658, 2208, 10252, 10302, 14218, 33877, 10317, 10485, 25964, 14815, 1363, 1397, 14827, 21708, 3801, 64698, 2179 or 13249 can be modified, (e.g., to enhance their stability or cellular uptake), by attaching lipophilic or other helper groups to PNA, by the formation of PNA-DNA chimeras, or by the use of liposomes or other techniques of drug delivery known in the art. For example, PNA-DNA chimeras of 15986, 2188, 20743, 9148, 9151, 9791, 44252, 14184, 42461, 8204, 7970, 25552, 21657, 26492, 2411, 15088, 1905, 28899, 63380, 33935, 10480, 12686, 25501, 17694, 15701, 53062, 49908, 21612, 38949, 6216, 46863, 9235, 2201, 6985, 9883, 12238, 18057, 21617, 39228, 49928, 54476, 62113, 64316, 12264, 32362, 58198, 2887, 3205, 8557, 9600, 9693, 44867, 53058, 55556, 57658, 2208, 10252, 10302, 14218, 33877, 10317, 10485, 25964, 14815, 1363, 1397, 14827, 21708, 3801, 64698, 2179 or 13249 nucleic acid molecules can be generated which may combine the advantageous properties of PNA and DNA. Such chimeras allow DNA recognition enzymes, (e.g., RNAse H and DNA polymerases), to interact with the DNA portion while the PNA portion would provide high binding affinity and specificity. PNA-DNA chimeras can be linked using linkers of appropriate lengths selected in terms of base stacking, number of bonds between the nucleobases, and orientation (Hyrup B. et al. (1996) supra). The synthesis of PNA-DNA chimeras can be performed as described in Hyrup B. et al. (1996) supra and Finn P. J. et al. (1996) Nucleic Acids Res. 24 (17): 3357-63. For example, a DNA chain can be synthesized on a solid support using standard phosphoramidite coupling chemistry and modified nucleoside analogs, e.g., 5′-(4-methoxytrityl)amino-5′-deoxy-thymidine phosphoramidite, can be used as a between the PNA and the 5′ end of DNA (Mag, M. et al. (1989) Nucleic Acid Res. 17: 5973-88). PNA monomers are then coupled in a stepwise manner to produce a chimeric molecule with a 5′ PNA segment and a 3′ DNA segment (Finn P. J. et al. (1996) supra). Alternatively, chimeric molecules can be synthesized with a 5′ DNA segment and a 3′ PNA segment (Peterser, K. H. et al. (1975) Bioorganic Med. Chem. Lett. 5: 1119-11124).

[1025] In other embodiments, the oligonucleotide used in the methods of the invention may include other appended groups such as peptides (e.g., for targeting host cell receptors in vivo), or agents facilitating transport across the cell membrane (see, e.g., Letsinger et al. (1989) Proc. Natl. Acad. Sci. USA 86:6553-6556; Lemaitre et al. (1987) Proc. Natl. Acad. Sci. USA 84:648-652; PCT Publication No. WO88/09810) or the blood-brain barrier (see, e.g., PCT Publication No. WO89/10134). In addition, oligonucleotides can be modified with hybridization-triggered cleavage agents (See, e.g., Krol et al. (1988) Bio-Techniques 6:958-976) or intercalating agents. (See, e.g., Zon (1988) Pharm. Res. 5:539-549). To this end, the oligonucleotide may be conjugated to another molecule, (e.g., a peptide, hybridization triggered cross-linking agent, transport agent, or hybridization-triggered cleavage agent).

[1026] Isolated 15986, 2188, 20743, 9148, 9151, 9791, 44252, 14184, 42461, 8204, 7970, 25552, 21657, 26492, 2411, 15088, 1905.28899, 63380, 33935, 10480, 12686, 25501, 17694, 15701.53062, 49908, 21612, 38949.6216, 46863, 9235, 2201, 6985.9883, 12238, 18057, 21617, 39228, 49928, 54476, 62113, 64316.12264, 32362, 58198, 2887, 3205, 8557, 9600, 9693, 44867, 53058, 55556, 57658.2208, 10252, 10302, 14218, 33877, 10317, 10485, 25964, 14815, 1363, 1397, 14827, 21708, 3801, 64698, 2179 or 13249 Proteins and Anti-15986, 2188, 20743, 9148, 9151, 9791, 44252, 14184, 42461, 8204, 7970, 25552, 21657, 26492, 2411, 15088, 1905, 28899, 63380, 33935, 10480, 12686, 25501, 17694, 15701, 53062, 49908, 21612, 38949, 6216, 46863, 9235, 2201, 6985, 9883, 12238, 18057, 21617, 39228, 49928, 54476, 62113, 64316, 12264, 32362, 58198, 2887, 3205, 8557, 9600, 9693, 44867, 53058, 55556, 57658, 2208, 10252, 10302, 14218, 33877, 10317, 10485, 25964, 14815, 1363, 1397, 14827, 21708, 3801, 64698, 2179 or 13249 Antibodies Used in the

[1027] Methods of the Invention

[1028] The methods of the invention include the use of isolated 15986, 2188, 20743, 9148, 9151, 9791, 44252, 14184, 42461, 8204, 7970, 25552, 21657, 26492, 2411, 15088, 1905, 28899, 63380, 33935, 10480, 12686, 25501, 17694, 15701, 53062, 49908, 21612, 38949, 6216, 46863, 9235, 2201, 6985, 9883, 12238, 18057, 21617, 39228, 49928, 54476, 62113, 64316, 12264, 32362, 58198, 2887, 3205, 8557, 9600, 9693, 44867, 53058, 55556, 57658, 2208, 10252, 10302, 14218, 33877, 10317, 10485, 25964, 14815, 1363, 1397, 14827, 21708, 3801, 64698, 2179 or 13249 proteins, and biologically active portions thereof, as well as polypeptide fragments suitable for use as immunogens to raise anti-15986, 2188, 20743, 9148, 9151, 9791, 44252, 14184, 42461, 8204, 7970, 25552, 21657, 26492, 2411, 15088, 1905, 28899, 63380, 33935, 10480, 12686, 25501, 17694, 15701, 53062, 49908, 21612, 38949, 6216, 46863, 9235, 2201, 6985, 9883, 12238, 18057, 21617, 39228, 49928, 54476, 62113, 64316, 12264, 32362, 58198, 2887, 3205, 8557, 9600, 9693, 44867, 53058, 55556, 57658, 2208, 10252, 10302, 14218, 33877, 10317, 10485, 25964, 14815, 1363, 1397, 14827, 21708, 3801, 64698, 2179 or 13249 antibodies. In one embodiment, native 15986, 2188, 20743, 9148, 9151, 9791, 44252, 14184, 42461, 8204, 7970, 25552, 21657, 26492, 2411, 15088, 1905, 28899, 63380, 33935, 10480, 12686, 25501, 17694, 15701, 53062, 49908, 21612, 38949, 6216, 46863, 9235, 2201, 6985, 9883, 12238, 18057, 21617, 39228, 49928, 54476, 62113, 64316, 12264, 32362, 58198, 2887, 3205, 8557, 9600, 9693, 44867, 53058, 55556, 57658, 2208, 10252, 10302, 14218, 33877, 10317, 10485, 25964, 14815, 1363, 1397, 14827, 21708, 3801, 64698, 2179 or 13249 proteins can be isolated from cells or tissue sources by an appropriate purification scheme using standard protein purification techniques. In another embodiment, 15986, 2188, 20743, 9148, 9151, 9791, 44252, 14184, 42461, 8204, 7970, 25552, 21657, 26492, 2411, 15088, 1905, 28899, 63380, 33935, 10480, 12686, 25501, 17694, 15701, 53062, 49908, 21612, 38949, 6216, 46863, 9235, 2201, 6985, 9883, 12238, 18057, 21617, 39228, 49928, 54476, 62113, 64316, 12264, 32362, 58198, 2887, 3205, 8557, 9600, 9693, 44867, 53058, 55556, 57658, 2208, 10252, 10302, 14218, 33877, 10317, 10485, 25964, 14815, 1363, 1397, 14827, 21708, 3801, 64698, 2179 or 13249 proteins are produced by recombinant DNA techniques. Alternative to recombinant expression, a 15986, 2188, 20743, 9148, 9151, 9791, 44252, 14184, 42461, 8204, 7970, 25552, 21657, 26492, 2411, 15088, 1905, 28899, 63380, 33935, 10480, 12686, 25501, 17694, 15701, 53062, 49908, 21612, 38949, 6216, 46863, 9235, 2201, 6985, 9883, 12238, 18057, 21617, 39228, 49928, 54476, 62113, 64316, 12264, 32362, 58198, 2887, 3205, 8557, 9600, 9693, 44867, 53058, 55556, 57658, 2208, 10252, 10302, 14218, 33877, 10317, 10485, 25964, 14815, 1363, 1397, 14827, 21708, 3801, 64698, 2179 or 13249 protein or polypeptide can be synthesized chemically using standard peptide synthesis techniques.

[1029] As used herein, a “biologically active portion” of a 15986, 2188, 20743, 9148, 9151, 9791, 44252, 14184, 42461, 8204, 7970, 25552, 21657, 26492, 2411, 15088, 1905, 28899, 63380, 33935, 10480, 12686, 25501, 17694, 15701, 53062, 49908, 21612, 38949, 6216, 46863, 9235, 2201, 6985, 9883, 12238, 18057, 21617, 39228, 49928, 54476, 62113, 64316, 12264, 32362, 58198, 2887, 3205, 8557, 9600, 9693, 44867, 53058, 55556, 57658, 2208, 10252, 10302, 14218, 33877, 10317, 10485, 25964, 14815, 1363, 1397, 14827, 21708, 3801, 64698, 2179 or 13249 protein includes a fragment of a 15986, 2188, 20743, 9148, 9151, 9791, 44252, 14184, 42461, 8204, 7970, 25552, 21657, 26492, 2411, 15088, 1905, 28899, 63380, 33935, 10480, 12686, 25501, 17694, 15701, 53062, 49908, 21612, 38949, 6216, 46863, 9235, 2201, 6985, 9883, 12238, 18057, 21617, 39228, 49928, 54476, 62113, 64316, 12264, 32362, 58198, 2887, 3205, 8557, 9600, 9693, 44867, 53058, 55556, 57658, 2208, 10252, 10302, 14218, 33877, 10317, 10485, 25964, 14815, 1363, 1397, 14827, 21708, 3801, 64698, 2179 or 13249 protein having a 15986, 2188, 20743, 9148, 9151, 9791, 44252, 14184, 42461, 8204, 7970, 25552, 21657, 26492, 2411, 15088, 1905, 28899, 63380, 33935, 10480, 12686, 25501, 17694, 15701, 53062, 49908, 21612, 38949, 6216, 46863, 9235, 2201, 6985, 9883, 12238, 18057, 21617, 39228, 49928, 54476, 62113, 64316, 12264, 32362, 58198, 2887, 3205, 8557, 9600, 9693, 44867, 53058, 55556, 57658, 2208, 10252, 10302, 14218, 33877, 10317, 10485, 25964, 14815, 1363, 1397, 14827, 21708, 3801, 64698, 2179 or 13249 activity. Biologically active portions of a 15986, 2188, 20743, 9148, 9151, 9791, 44252, 14184, 42461, 8204, 7970, 25552, 21657, 26492, 2411, 15088, 1905, 28899, 63380, 33935, 10480, 12686, 25501, 17694, 15701, 53062, 49908, 21612, 38949, 6216, 46863, 9235, 2201, 6985, 9883, 12238, 18057, 21617, 39228, 49928, 54476, 62113, 64316, 12264, 32362, 58198, 2887, 3205, 8557, 9600, 9693, 44867, 53058, 55556, 57658, 2208, 10252, 10302, 14218, 33877, 10317, 10485, 25964, 14815, 1363, 1397, 14827, 21708, 3801, 64698, 2179 or 13249 protein include peptides comprising amino acid sequences sufficiently identical to or derived from the amino acid sequence of the 15986, 2188, 20743, 9148, 9151, 9791, 44252, 14184, 42461, 8204, 7970, 25552, 21657, 26492, 2411, 15088, 1905, 28899, 63380, 33935, 10480, 12686, 25501, 17694, 15701, 53062, 49908, 21612, 38949, 6216, 46863, 9235, 2201, 6985, 9883, 12238, 18057, 21617, 39228, 49928, 54476, 62113, 64316, 12264, 32362, 58198, 2887, 3205, 8557, 9600, 9693, 44867, 53058, 55556, 57658, 2208, 10252, 10302, 14218, 33877, 10317, 10485, 25964, 14815, 1363, 1397, 14827, 21708, 3801, 64698, 2179 or 13249 protein, e.g., the amino acid sequence shown in SEQ ID NO:2, 4, 6, 8, 10, 12, 14, 16, 18, 20, 22, 24, 26, 28, 30, 32, 34, 36, 38, 40, 42, 44, 46, 48, 50, 52, 54, 56, 58, 60, 62, 64, 66, 68, 70, 72, 74, 76, 78, 80, 82, 84, 86, 88, 90, 92, 94, 96, 98, 100, 102, 104, 106, 108, 110, 112, 114, 116, 118, 120, 122, 124, 126, 128, 130, 132, 134, 136, 138, 140, 142 or 144, which include fewer amino acids than the full length 15986, 2188, 20743, 9148, 9151, 9791, 44252, 14184, 42461, 8204, 7970, 25552, 21657, 26492, 2411, 15088, 1905, 28899, 63380, 33935, 10480, 12686, 25501, 17694, 15701, 53062, 49908, 21612, 38949, 6216, 46863, 9235, 2201, 6985, 9883, 12238, 18057, 21617, 39228, 49928, 54476, 62113, 64316, 12264, 32362, 58198, 2887, 3205, 8557, 9600, 9693, 44867, 53058, 55556, 57658, 2208, 10252, 10302, 14218, 33877, 10317, 10485, 25964, 14815, 1363, 1397, 14827, 21708, 3801, 64698, 2179 or 13249 proteins, and exhibit at least one activity of a 15986, 2188, 20743, 9148, 9151, 9791, 44252, 14184, 42461, 8204, 7970, 25552, 21657, 26492, 2411, 15088, 1905, 28899, 63380, 33935, 10480, 12686, 25501, 17694, 15701, 53062, 49908, 21612, 38949, 6216, 46863, 9235, 2201, 6985, 9883, 12238, 18057, 21617, 39228, 49928, 54476, 62113, 64316, 12264, 32362, 58198, 2887, 3205, 8557, 9600, 9693, 44867, 53058, 55556, 57658, 2208, 10252, 10302, 14218, 33877, 10317, 10485, 25964, 14815, 1363, 1397, 14827, 21708, 3801, 64698, 2179 or 13249 protein. Typically, biologically active portions comprise a domain or motif with at least one activity of the 15986, 2188, 20743, 9148, 9151, 9791, 44252, 14184, 42461, 8204, 7970, 25552, 21657, 26492, 2411, 15088, 1905, 28899, 63380, 33935, 10480, 12686, 25501, 17694, 15701, 53062, 49908, 21612, 38949, 6216, 46863, 9235, 2201, 6985, 9883, 12238, 18057, 21617, 39228, 49928, 54476, 62113, 64316, 12264, 32362, 58198, 2887, 3205, 8557, 9600, 9693, 44867, 53058, 55556, 57658, 2208, 10252, 10302, 14218, 33877, 10317, 10485, 25964, 14815, 1363, 1397, 14827, 21708, 3801, 64698, 2179 or 13249 protein (e.g., the N-terminal region of the 15986, 2188, 20743, 9148, 9151, 9791, 44252, 14184, 42461, 8204, 7970, 25552, 21657, 26492, 2411, 15088, 1905, 28899, 63380, 33935, 10480, 12686, 25501, 17694, 15701, 53062, 49908, 21612, 38949, 6216, 46863, 9235, 2201, 6985, 9883, 12238, 18057, 21617, 39228, 49928, 54476, 62113, 64316, 12264, 32362, 58198, 2887, 3205, 8557, 9600, 9693, 44867, 53058, 55556, 57658, 2208, 10252, 10302, 14218, 33877, 10317, 10485, 25964, 14815, 1363, 1397, 14827, 21708, 3801, 64698, 2179 or 13249 protein that is believed to be involved in the regulation of apoptotic activity). A biologically active portion of a 15986, 2188, 20743, 9148, 9151, 9791, 44252, 14184, 42461, 8204, 7970, 25552, 21657, 26492, 2411, 15088, 1905, 28899, 63380, 33935, 10480, 12686, 25501, 17694, 15701, 53062, 49908, 21612, 38949, 6216, 46863, 9235, 2201, 6985, 9883, 12238, 18057, 21617, 39228, 49928, 54476, 62113, 64316, 12264, 32362, 58198, 2887, 3205, 8557, 9600, 9693, 44867, 53058, 55556, 57658, 2208, 10252, 10302, 14218, 33877, 10317, 10485, 25964, 14815, 1363, 1397, 14827, 21708, 3801, 64698, 2179 or 13249 protein can be a polypeptide which is, for example, 25, 50, 75, 100, 125, 150, 175, 200, 250, 300 or more amino acids in length. Biologically active portions of a 15986, 2188, 20743, 9148, 9151, 9791, 44252, 14184, 42461, 8204, 7970, 25552, 21657, 26492, 2411, 15088, 1905, 28899, 63380, 33935, 10480, 12686, 25501, 17694, 15701, 53062, 49908, 21612, 38949, 6216, 46863, 9235, 2201, 6985, 9883, 12238, 18057, 21617, 39228, 49928, 54476, 62113, 64316, 12264, 32362, 58198, 2887, 3205, 8557, 9600, 9693, 44867, 53058, 55556, 57658, 2208, 10252, 10302, 14218, 33877, 10317, 10485, 25964, 14815, 1363, 1397, 14827, 21708, 3801, 64698, 2179 or 13249 protein can be used as targets for developing agents which modulate a 15986, 2188, 20743, 9148, 9151, 9791, 44252, 14184, 42461, 8204, 7970, 25552, 21657, 26492, 2411, 15088, 1905, 28899, 63380, 33935, 10480, 12686, 25501, 17694, 15701, 53062, 49908, 21612, 38949, 6216, 46863, 9235, 2201, 6985, 9883, 12238, 18057, 21617, 39228, 49928, 54476, 62113, 64316, 12264, 32362, 58198, 2887, 3205, 8557, 9600, 9693, 44867, 53058, 55556, 57658, 2208, 10252, 10302, 14218, 33877, 10317, 10485, 25964, 14815, 1363, 1397, 14827, 21708, 3801, 64698, 2179 or 13249 activity.

[1030] In a preferred embodiment, the 15986, 2188, 20743, 9148, 9151, 9791, 44252, 14184, 42461, 8204, 7970, 25552, 21657, 26492, 2411, 15088, 1905, 28899, 63380, 33935, 10480, 12686, 25501, 17694, 15701, 53062, 49908, 21612, 38949, 6216, 46863, 9235, 2201, 6985, 9883, 12238, 18057, 21617, 39228, 49928, 54476, 62113, 64316, 12264, 32362, 58198, 2887, 3205, 8557, 9600, 9693, 44867, 53058, 55556, 57658, 2208, 10252, 10302, 14218, 33877, 10317, 10485, 25964, 14815, 1363, 1397, 14827, 21708, 3801, 64698, 2179 or 13249 protein used in the methods of the invention has an amino acid sequence shown in SEQ ID NO:2, 4, 6, 8, 10, 12, 14, 16, 18, 20, 22, 24, 26, 28, 30, 32, 34, 36, 38, 40, 42, 44, 46, 48, 50, 52, 54, 56, 58, 60, 62, 64, 66, 68, 70, 72, 74, 76, 78, 80, 82, 84, 86, 88, 90, 92, 94, 96, 98, 100, 102, 104, 106, 108, 110, 112, 114, 116, 118, 120, 122, 124, 126, 128, 130, 132, 134, 136, 138, 140, 142 or 144. In other embodiments, the 15986, 2188, 20743, 9148, 9151, 9791, 44252, 14184, 42461, 8204, 7970, 25552, 21657, 26492, 2411, 15088, 1905, 28899, 63380, 33935, 10480, 12686, 25501, 17694, 15701, 53062, 49908, 21612, 38949, 6216, 46863, 9235, 2201, 6985, 9883, 12238, 18057, 21617, 39228, 49928, 54476, 62113, 64316, 12264, 32362, 58198, 2887, 3205, 8557, 9600, 9693, 44867, 53058, 55556, 57658, 2208, 10252, 10302, 14218, 33877, 10317, 10485, 25964, 14815, 1363, 1397, 14827, 21708, 3801, 64698, 2179 or 13249 protein is substantially identical to SEQ ID NO:2, 4, 6, 8, 10, 12, 14, 16, 18, 20, 22, 24, 26, 28, 30, 32, 34, 36, 38, 40, 42, 44, 46, 48, 50, 52, 54, 56, 58, 60, 62, 64, 66, 68, 70, 72, 74, 76, 78, 80, 82, 84, 86, 88, 90, 92, 94, 96, 98, 100, 102, 104, 106, 108, 110, 112, 114, 116, 118, 120, 122, 124, 126, 128, 130, 132, 134, 136, 138, 140, 142 or 144, and retains the functional activity of the protein of SEQ ID NO:2, 4, 6, 8, 10, 12, 14, 16, 18, 20, 22, 24, 26, 28, 30, 32, 34, 36, 38, 40, 42, 44, 46, 48, 50, 52, 54, 56, 58, 60, 62, 64, 66, 68, 70, 72, 74, 76, 78, 80, 82, 84, 86, 88, 90, 92, 94, 96, 98, 100, 102, 104, 106, 108, 110, 112, 114, 116, 118, 120, 122, 124, 126, 128, 130, 132, 134, 136, 138, 140, 142 or 144, yet differs in amino acid sequence due to natural allelic variation or mutagenesis, as described in detail in subsection V above. Accordingly, in another embodiment, the 15986, 2188, 20743, 9148, 9151, 9791, 44252, 14184, 42461, 8204, 7970, 25552, 21657, 26492, 2411, 15088, 1905, 28899, 63380, 33935, 10480, 12686, 25501, 17694, 15701, 53062, 49908, 21612, 38949, 6216, 46863, 9235, 2201, 6985, 9883, 12238, 18057, 21617, 39228, 49928, 54476, 62113, 64316, 12264, 32362, 58198, 2887, 3205, 8557, 9600, 9693, 44867, 53058, 55556, 57658, 2208, 10252, 10302, 14218, 33877, 10317, 10485, 25964, 14815, 1363, 1397, 14827, 21708, 3801, 64698, 2179 or 13249 protein used in the methods of the invention is a protein which comprises an amino acid sequence at least about 50%, 55%, 60%, 65%, 70%, 75%, 80%, 85%, 90%, 95%, 96%, 97%, 98%, 99% or more identical to SEQ ID NO:2, 4, 6, 8, 10, 12, 14, 16, 18, 20, 22, 24, 26, 28, 30, 32, 34, 36, 38, 40, 42, 44, 46, 48, 50, 52, 54, 56, 58, 60, 62, 64, 66, 68, 70, 72, 74, 76, 78, 80, 82, 84, 86, 88, 90, 92, 94, 96, 98, 100, 102, 104, 106, 108, 110, 112, 114, 116, 118, 120, 122, 124, 126, 128, 130, 132, 134, 136, 138, 140, 142 or 144.

[1031] To determine the percent identity of two amino acid sequences or of two nucleic acid sequences, the sequences are aligned for optimal comparison purposes (e.g., gaps can be introduced in one or both of a first and a second amino acid or nucleic acid sequence for optimal alignment and non-identical sequences can be disregarded for comparison purposes). In a preferred embodiment, the length of a reference sequence aligned for comparison purposes is at least 30%, preferably at least 40%, more preferably at least 50%, even more preferably at least 60%, and even more preferably at least 70%, 80%, or 90% of the length of the reference sequence (e.g., when aligning a second sequence to the 15986, 2188, 20743, 9148, 9151, 9791, 44252, 14184, 42461, 8204, 7970, 25552, 21657, 26492, 2411, 15088, 1905, 28899, 63380, 33935, 10480, 12686, 25501, 17694, 15701, 53062, 49908, 21612, 38949, 6216, 46863, 9235, 2201, 6985, 9883, 12238, 18057, 21617, 39228, 49928, 54476, 62113, 64316, 12264, 32362, 58198, 2887, 3205, 8557, 9600, 9693, 44867, 53058, 55556, 57658, 2208, 10252, 10302, 14218, 33877, 10317, 10485, 25964, 14815, 1363, 1397, 14827, 21708, 3801, 64698, 2179 or 13249 amino acid sequence of SEQ ID NO:2, 4, 6, 8, 10, 12, 14, 16, 18, 20, 22, 24, 26, 28, 30, 32, 34, 36, 38, 40, 42, 44, 46, 48, 50, 52, 54, 56, 58, 60, 62, 64, 66, 68, 70, 72, 74, 76, 78, 80, 82, 84, 86, 88, 90, 92, 94, 96, 98, 100, 102, 104, 106, 108, 110, 112, 114, 116, 118, 120, 122, 124, 126, 128, 130, 132, 134, 136, 138, 140, 142 or 144 having 500 amino acid residues, at least 75, preferably at least 150, more preferably at least 225, even more preferably at least 300, and even more preferably at least 400 or more amino acid residues are aligned). The amino acid residues or nucleotides at corresponding amino acid positions or nucleotide positions are then compared. When a position in the first sequence is occupied by the same amino acid residue or nucleotide as the corresponding position in the second sequence, then the molecules are identical at that position (as used herein amino acid or nucleic acid “identity” is equivalent to amino acid or nucleic acid “homology”). The percent identity between the two sequences is a function of the number of identical positions shared by the sequences, taking into account the number of gaps, and the length of each gap, which need to be introduced for optimal alignment of the two sequences.

[1032] The comparison of sequences and determination of percent identity between two sequences can be accomplished using a mathematical algorithm. In a preferred embodiment, the percent identity between two amino acid sequences is determined using the Needleman and Wunsch (J. Mol. Biol. 48:444-453 (1970)) algorithm which has been incorporated into the GAP program in the GCG software package, using either a Blosum 62 matrix or a PAM250 matrix, and a gap weight of 16, 14, 12, 10, 8, 6, or 4 and a length weight of 1, 2, 3, 4, 5, or 6. In yet another preferred embodiment, the percent identity between two nucleotide sequences is determined using the GAP program in the GCG software package, using a NWSgapdna.CMP matrix and a gap weight of 40, 50, 60, 70, or 80 and a length weight of 1, 2, 3, 4, 5, or 6. In another embodiment, the percent identity between two amino acid or nucleotide sequences is determined using the algorithm of E. Meyers and W. Miller (Comput. Appl. Biosci. 4:11-17 (1988)) which has been incorporated into the ALIGN program (version 2.0 or 2.0U), using a PAM120 weight residue table, a gap length penalty of 12 and a gap penalty of 4.

[1033] The methods of the invention may also use 15986, 2188, 20743, 9148, 9151, 9791, 44252, 14184, 42461, 8204, 7970, 25552, 21657, 26492, 2411, 15088, 1905, 28899, 63380, 33935, 10480, 12686, 25501, 17694, 15701, 53062, 49908, 21612, 38949, 6216, 46863, 9235, 2201, 6985, 9883, 12238, 18057, 21617, 39228, 49928, 54476, 62113, 64316, 12264, 32362, 58198, 2887, 3205, 8557, 9600, 9693, 44867, 53058, 55556, 57658, 2208, 10252, 10302, 14218, 33877, 10317, 10485, 25964, 14815, 1363, 1397, 14827, 21708, 3801, 64698, 2179 or 13249 chimeric or fusion proteins. As used herein, a 15986, 2188, 20743, 9148, 9151, 9791, 44252, 14184, 42461, 8204, 7970, 25552, 21657, 26492, 2411, 15088, 1905, 28899, 63380, 33935, 10480, 12686, 25501, 17694, 15701, 53062, 49908, 21612, 38949, 6216, 46863, 9235, 2201, 6985, 9883, 12238, 18057, 21617, 39228, 49928, 54476, 62113, 64316, 12264, 32362, 58198, 2887, 3205, 8557, 9600, 9693, 44867, 53058, 55556, 57658, 2208, 10252, 10302, 14218, 33877, 10317, 10485, 25964, 14815, 1363, 1397, 14827, 21708, 3801, 64698, 2179 or 13249 “chimeric protein” or “fusion protein” comprises a 15986, 2188, 20743, 9148, 9151, 9791, 44252, 14184, 42461, 8204, 7970, 25552, 21657, 26492, 2411, 15088, 1905, 28899, 63380, 33935, 10480, 12686, 25501, 17694, 15701, 53062, 49908, 21612, 38949, 6216, 46863, 9235, 2201, 6985, 9883, 12238, 18057, 21617, 39228, 49928, 54476, 62113, 64316, 12264, 32362, 58198, 2887, 3205, 8557, 9600, 9693, 44867, 53058, 55556, 57658, 2208, 10252, 10302, 14218, 33877, 10317, 10485, 25964, 14815, 1363, 1397, 14827, 21708, 3801, 64698, 2179 or 13249 polypeptide operatively linked to a non-15986, 2188, 20743, 9148, 9151, 9791, 44252, 14184, 42461, 8204, 7970, 25552, 21657, 26492, 2411, 15088, 1905, 28899, 63380, 33935, 10480, 12686, 25501, 17694, 15701, 53062, 49908, 21612, 38949, 6216, 46863, 9235, 2201, 6985, 9883, 12238, 18057, 21617, 39228, 49928, 54476, 62113, 64316, 12264, 32362, 58198, 2887, 3205, 8557, 9600, 9693, 44867, 53058, 55556, 57658, 2208, 10252, 10302, 14218, 33877, 10317, 10485, 25964, 14815, 1363, 1397, 14827, 21708, 3801, 64698, 2179 or 13249 polypeptide. An “15986, 2188, 20743, 9148, 9151, 9791, 44252, 14184, 42461, 8204, 7970, 25552, 21657, 26492, 2411, 15088, 1905, 28899, 63380, 33935, 10480, 12686, 25501, 17694, 15701, 53062, 49908, 21612, 38949, 6216, 46863, 9235, 2201, 6985, 9883, 12238, 18057, 21617, 39228, 49928, 54476, 62113, 64316, 12264, 32362, 58198, 2887, 3205, 8557, 9600, 9693, 44867, 53058, 55556, 57658, 2208, 10252, 10302, 14218, 33877, 10317, 10485, 25964, 14815, 1363, 1397, 14827, 21708, 3801, 64698, 2179 or 13249 polypeptide” refers to a polypeptide having an amino acid sequence corresponding to a 15986, 2188, 20743, 9148, 9151, 9791, 44252, 14184, 42461, 8204, 7970, 25552, 21657, 26492, 2411, 15088, 1905, 28899, 63380, 33935, 10480, 12686, 25501, 17694, 15701, 53062, 49908, 21612, 38949, 6216, 46863, 9235, 2201, 6985, 9883, 12238, 18057, 21617, 39228, 49928, 54476, 62113, 64316, 12264, 32362, 58198, 2887, 3205, 8557, 9600, 9693, 44867, 53058, 55556, 57658, 2208, 10252, 10302, 14218, 33877, 10317, 10485, 25964, 14815, 1363, 1397, 14827, 21708, 3801, 64698, 2179 or 13249 molecule, whereas a “non-15986, 2188, 20743, 9148, 9151, 9791, 44252, 14184, 42461, 8204, 7970, 25552, 21657, 26492, 2411, 15088, 1905, 28899, 63380, 33935, 10480, 12686, 25501, 17694, 15701, 53062, 49908, 21612, 38949, 6216, 46863, 9235, 2201, 6985, 9883, 12238, 18057, 21617, 39228, 49928, 54476, 62113, 64316, 12264, 32362, 58198, 2887, 3205, 8557, 9600, 9693, 44867, 53058, 55556, 57658, 2208, 10252, 10302, 14218, 33877, 10317, 10485, 25964, 14815, 1363, 1397, 14827, 21708, 3801, 64698, 2179 or 13249 polypeptide” refers to a polypeptide having an amino acid sequence corresponding to a protein which is not substantially homologous to the 15986, 2188, 20743, 9148, 9151, 9791, 44252, 14184, 42461, 8204, 7970, 25552, 21657, 26492, 2411, 15088, 1905, 28899, 63380, 33935, 10480, 12686, 25501, 17694, 15701, 53062, 49908, 21612, 38949, 6216, 46863, 9235, 2201, 6985, 9883, 12238, 18057, 21617, 39228, 49928, 54476, 62113, 64316, 12264, 32362, 58198, 2887, 3205, 8557, 9600, 9693, 44867, 53058, 55556, 57658, 2208, 10252, 10302, 14218, 33877, 10317, 10485, 25964, 14815, 1363, 1397, 14827, 21708, 3801, 64698, 2179 or 13249 protein, e.g., a protein which is different from the 15986, 2188, 20743, 9148, 9151, 9791, 44252, 14184, 42461, 8204, 7970, 25552, 21657, 26492, 2411, 15088, 1905, 28899, 63380, 33935, 10480, 12686, 25501, 17694, 15701, 53062, 49908, 21612, 38949, 6216, 46863, 9235, 2201, 6985, 9883, 12238, 18057, 21617, 39228, 49928, 54476, 62113, 64316, 12264, 32362, 58198, 2887, 3205, 8557, 9600, 9693, 44867, 53058, 55556, 57658, 2208, 10252, 10302, 14218, 33877, 10317, 10485, 25964, 14815, 1363, 1397, 14827, 21708, 3801, 64698, 2179 or 13249 protein and which is derived from the same or a different organism. Within a 15986, 2188, 20743, 9148, 9151, 9791, 44252, 14184, 42461, 8204, 7970, 25552, 21657, 26492, 2411, 15088, 1905, 28899, 63380, 33935, 10480, 12686, 25501, 17694, 15701, 53062, 49908, 21612, 38949, 6216, 46863, 9235, 2201, 6985, 9883, 12238, 18057, 21617, 39228, 49928, 54476, 62113, 64316, 12264, 32362, 58198, 2887, 3205, 8557, 9600, 9693, 44867, 53058, 55556, 57658, 2208, 10252, 10302, 14218, 33877, 10317, 10485, 25964, 14815, 1363, 1397, 14827, 21708, 3801, 64698, 2179 or 13249 fusion protein the 15986, 2188, 20743, 9148, 9151, 9791, 44252, 14184, 42461, 8204, 7970, 25552, 21657, 26492, 2411, 15088, 1905, 28899, 63380, 33935, 10480, 12686, 25501, 17694, 15701, 53062, 49908, 21612, 38949, 6216, 46863, 9235, 2201, 6985, 9883, 12238, 18057, 21617, 39228, 49928, 54476, 62113, 64316, 12264, 32362, 58198, 2887, 3205, 8557, 9600, 9693, 44867, 53058, 55556, 57658, 2208, 10252, 10302, 14218, 33877, 10317, 10485, 25964, 14815, 1363, 1397, 14827, 21708, 3801, 64698, 2179 or 13249 polypeptide can correspond to all or a portion of a 15986, 2188, 20743, 9148, 9151, 9791, 44252, 14184, 42461, 8204, 7970, 25552, 21657, 26492, 2411, 15088, 1905, 28899, 63380, 33935, 10480, 12686, 25501, 17694, 15701, 53062, 49908, 21612, 38949, 6216, 46863, 9235, 2201, 6985, 9883, 12238, 18057, 21617, 39228, 49928, 54476, 62113, 64316, 12264, 32362, 58198, 2887, 3205, 8557, 9600, 9693, 44867, 53058, 55556, 57658, 2208, 10252, 10302, 14218, 33877, 10317, 10485, 25964, 14815, 1363, 1397, 14827, 21708, 3801, 64698, 2179 or 13249 protein. In a preferred embodiment, a 15986, 2188, 20743, 9148, 9151, 9791, 44252, 14184, 42461, 8204, 7970, 25552, 21657, 26492, 2411, 15088, 1905, 28899, 63380, 33935, 10480, 12686, 25501, 17694, 15701, 53062, 49908, 21612, 38949, 6216, 46863, 9235, 2201, 6985, 9883, 12238, 18057, 21617, 39228, 49928, 54476, 62113, 64316, 12264, 32362, 58198, 2887, 3205, 8557, 9600, 9693, 44867, 53058, 55556, 57658, 2208, 10252, 10302, 14218, 33877, 10317, 10485, 25964, 14815, 1363, 1397, 14827, 21708, 3801, 64698, 2179 or 13249 fusion protein comprises at least one biologically active portion of a 15986, 2188, 20743, 9148, 9151, 9791, 44252, 14184, 42461, 8204, 7970, 25552, 21657, 26492, 2411, 15088, 1905, 28899, 63380, 33935, 10480, 12686, 25501, 17694, 15701, 53062, 49908, 21612, 38949, 6216, 46863, 9235, 2201, 6985, 9883, 12238, 18057, 21617, 39228, 49928, 54476, 62113, 64316, 12264, 32362, 58198, 2887, 3205, 8557, 9600, 9693, 44867, 53058, 55556, 57658, 2208, 10252, 10302, 14218, 33877, 10317, 10485, 25964, 14815, 1363, 1397, 14827, 21708, 3801, 64698, 2179 or 13249 protein. In another preferred embodiment, a 15986, 2188, 20743, 9148, 9151, 9791, 44252, 14184, 42461, 8204, 7970, 25552, 21657, 26492, 2411, 15088, 1905, 28899, 63380, 33935, 10480, 12686, 25501, 17694, 15701, 53062, 49908, 21612, 38949, 6216, 46863, 9235, 2201, 6985, 9883, 12238, 18057, 21617, 39228, 49928, 54476, 62113, 64316, 12264, 32362, 58198, 2887, 3205, 8557, 9600, 9693, 44867, 53058, 55556, 57658, 2208, 10252, 10302, 14218, 33877, 10317, 10485, 25964, 14815, 1363, 1397, 14827, 21708, 3801, 64698, 2179 or 13249 fusion protein comprises at least two biologically active portions of a 15986, 2188, 20743, 9148, 9151, 9791, 44252, 14184, 42461, 8204, 7970, 25552, 21657, 26492, 2411, 15088, 1905, 28899, 63380, 33935, 10480, 12686, 25501, 17694, 15701, 53062, 49908, 21612, 38949, 6216, 46863, 9235, 2201, 6985, 9883, 12238, 18057, 21617, 39228, 49928, 54476, 62113, 64316, 12264, 32362, 58198, 2887, 3205, 8557, 9600, 9693, 44867, 53058, 55556, 57658, 2208, 10252, 10302, 14218, 33877, 10317, 10485, 25964, 14815, 1363, 1397, 14827, 21708, 3801, 64698, 2179 or 13249 protein. Within the fusion protein, the term “operatively linked” is intended to indicate that the 15986, 2188, 20743, 9148, 9151, 9791, 44252, 14184, 42461, 8204, 7970, 25552, 21657, 26492, 2411, 15088, 1905, 28899, 63380, 33935, 10480, 12686, 25501, 17694, 15701, 53062, 49908, 21612, 38949, 6216, 46863, 9235, 2201, 6985, 9883, 12238, 18057, 21617, 39228, 49928, 54476, 62113, 64316, 12264, 32362, 58198, 2887, 3205, 8557, 9600, 9693, 44867, 53058, 55556, 57658, 2208, 10252, 10302, 14218, 33877, 10317, 10485, 25964, 14815, 1363, 1397, 14827, 21708, 3801, 64698, 2179 or 13249 polypeptide and the non-15986, 2188, 20743, 9148, 9151, 9791, 44252, 14184, 42461, 8204, 7970, 25552, 21657, 26492, 2411, 15088, 1905, 28899, 63380, 33935, 10480, 12686, 25501, 17694, 15701, 53062, 49908, 21612, 38949, 6216, 46863, 9235, 2201, 6985, 9883, 12238, 18057, 21617, 39228, 49928, 54476, 62113, 64316, 12264, 32362, 58198, 2887, 3205, 8557, 9600, 9693, 44867, 53058, 55556, 57658, 2208, 10252, 10302, 14218, 33877, 10317, 10485, 25964, 14815, 1363, 1397, 14827, 21708, 3801, 64698, 2179 or 13249 polypeptide are fused in-frame to each other. The non-15986, 2188, 20743, 9148, 9151, 9791, 44252, 14184, 42461, 8204, 7970, 25552, 21657, 26492, 2411, 15088, 1905, 28899, 63380, 33935, 10480, 12686, 25501, 17694, 15701, 53062, 49908, 21612, 38949, 6216, 46863, 9235, 2201, 6985, 9883, 12238, 18057, 21617, 39228, 49928, 54476, 62113, 64316, 12264, 32362, 58198, 2887, 3205, 8557, 9600, 9693, 44867, 53058, 55556, 57658, 2208, 10252, 10302, 14218, 33877, 10317, 10485, 25964, 14815, 1363, 1397, 14827, 21708, 3801, 64698, 2179 or 13249 polypeptide can be fused to the N-terminus or C-terminus of the 15986, 2188, 20743, 9148, 9151, 9791, 44252, 14184, 42461, 8204, 7970, 25552, 21657, 26492, 2411, 15088, 1905, 28899, 63380, 33935, 10480, 12686, 25501, 17694, 15701, 53062, 49908, 21612, 38949, 6216, 46863, 9235, 2201, 6985, 9883, 12238, 18057, 21617, 39228, 49928, 54476, 62113, 64316, 12264, 32362, 58198, 2887, 3205, 8557, 9600, 9693, 44867, 53058, 55556, 57658, 2208, 10252, 10302, 14218, 33877, 10317, 10485, 25964, 14815, 1363, 1397, 14827, 21708, 3801, 64698, 2179 or 13249 polypeptide.

[1034] For example, in one embodiment, the fusion protein is a GST-15986, 2188, 20743, 9148, 9151, 9791, 44252, 14184, 42461, 8204, 7970, 25552, 21657, 26492, 2411, 15088, 1905, 28899, 63380, 33935, 10480, 12686, 25501, 17694, 15701, 53062, 49908, 21612, 38949, 6216, 46863, 9235, 2201, 6985, 9883, 12238, 18057, 21617, 39228, 49928, 54476, 62113, 64316, 12264, 32362, 58198, 2887, 3205, 8557, 9600, 9693, 44867, 53058, 55556, 57658, 2208, 10252, 10302, 14218, 33877, 10317, 10485, 25964, 14815, 1363, 1397, 14827, 21708, 3801, 64698, 2179 or 13249 fusion protein in which the 15986, 2188, 20743, 9148, 9151, 9791, 44252, 14184, 42461, 8204, 7970, 25552, 21657, 26492, 2411, 15088, 1905, 28899, 63380, 33935, 10480, 12686, 25501, 17694, 15701, 53062, 49908, 21612, 38949, 6216, 46863, 9235, 2201, 6985, 9883, 12238, 18057, 21617, 39228, 49928, 54476, 62113, 64316, 12264, 32362, 58198, 2887, 3205, 8557, 9600, 9693, 44867, 53058, 55556, 57658, 2208, 10252, 10302, 14218, 33877, 10317, 10485, 25964, 14815, 1363, 1397, 14827, 21708, 3801, 64698, 2179 or 13249 sequences are fused to the C-terminus of the GST sequences. Such fusion proteins can facilitate the purification of recombinant 15986, 2188, 20743, 9148, 9151, 9791, 44252, 14184, 42461, 8204, 7970, 25552, 21657, 26492, 2411, 15088, 1905, 28899, 63380, 33935, 10480, 12686, 25501, 17694, 15701, 53062, 49908, 21612, 38949, 6216, 46863, 9235, 2201, 6985, 9883, 12238, 18057, 21617, 39228, 49928, 54476, 62113, 64316, 12264, 32362, 58198, 2887, 3205, 8557, 9600, 9693, 44867, 53058, 55556, 57658, 2208, 10252, 10302, 14218, 33877, 10317, 10485, 25964, 14815, 1363, 1397, 14827, 21708, 3801, 64698, 2179 or 13249.

[1035] In another embodiment, this fusion protein is a 15986, 2188, 20743, 9148, 9151, 9791, 44252, 14184, 42461, 8204, 7970, 25552, 21657, 26492, 2411, 15088, 1905, 28899, 63380, 33935, 10480, 12686, 25501, 17694, 15701, 53062, 49908, 21612, 38949, 6216, 46863, 9235, 2201, 6985, 9883, 12238, 18057, 21617, 39228, 49928, 54476, 62113, 64316, 12264, 32362, 58198, 2887, 3205, 8557, 9600, 9693, 44867, 53058, 55556, 57658, 2208, 10252, 10302, 14218, 33877, 10317, 10485, 25964, 14815, 1363, 1397, 14827, 21708, 3801, 64698, 2179 or 13249 protein containing a heterologous signal sequence at its N-terminus. In certain host cells (e.g., mammalian host cells), expression and/or secretion of 15986, 2188, 20743, 9148, 9151, 9791, 44252, 14184, 42461, 8204, 7970, 25552, 21657, 26492, 2411, 15088, 1905, 28899, 63380, 33935, 10480, 12686, 25501, 17694, 15701, 53062, 49908, 21612, 38949, 6216, 46863, 9235, 2201, 6985, 9883, 12238, 18057, 21617, 39228, 49928, 54476, 62113, 64316, 12264, 32362, 58198, 2887, 3205, 8557, 9600, 9693, 44867, 53058, 55556, 57658, 2208, 10252, 10302, 14218, 33877, 10317, 10485, 25964, 14815, 1363, 1397, 14827, 21708, 3801, 64698, 2179 or 13249 can be increased through use of a heterologous signal sequence.

[1036] The 15986, 2188, 20743, 9148, 9151, 9791, 44252, 14184, 42461, 8204, 7970, 25552, 21657, 26492, 2411, 15088, 1905, 28899, 63380, 33935, 10480, 12686, 25501, 17694, 15701, 53062, 49908, 21612, 38949, 6216, 46863, 9235, 2201, 6985, 9883, 12238, 18057, 21617, 39228, 49928, 54476, 62113, 64316, 12264, 32362, 58198, 2887, 3205, 8557, 9600, 9693, 44867, 53058, 55556, 57658, 2208, 10252, 10302, 14218, 33877, 10317, 10485, 25964, 14815, 1363, 1397, 14827, 21708, 3801, 64698, 2179 or 13249 fusion proteins used in the methods of the invention can be incorporated into pharmaceutical compositions and administered to a subject in vivo. The 15986, 2188, 20743, 9148, 9151, 9791, 44252, 14184, 42461, 8204, 7970, 25552, 21657, 26492, 2411, 15088, 1905, 28899, 63380, 33935, 10480, 12686, 25501, 17694, 15701, 53062, 49908, 21612, 38949, 6216, 46863, 9235, 2201, 6985, 9883, 12238, 18057, 21617, 39228, 49928, 54476, 62113, 64316, 12264, 32362, 58198, 2887, 3205, 8557, 9600, 9693, 44867, 53058, 55556, 57658, 2208, 10252, 10302, 14218, 33877, 10317, 10485, 25964, 14815, 1363, 1397, 14827, 21708, 3801, 64698, 2179 or 13249 fusion proteins can be used to affect the bioavailability of a 15986, 2188, 20743, 9148, 9151, 9791, 44252, 14184, 42461, 8204, 7970, 25552, 21657, 26492, 2411, 15088, 1905, 28899, 63380, 33935, 10480, 12686, 25501, 17694, 15701, 53062, 49908, 21612, 38949, 6216, 46863, 9235, 2201, 6985, 9883, 12238, 18057, 21617, 39228, 49928, 54476, 62113, 64316, 12264, 32362, 58198, 2887, 3205, 8557, 9600, 9693, 44867, 53058, 55556, 57658, 2208, 10252, 10302, 14218, 33877, 10317, 10485, 25964, 14815, 1363, 1397, 14827, 21708, 3801, 64698, 2179 or 13249 substrate. Use of 15986, 2188, 20743, 9148, 9151, 9791, 44252, 14184, 42461, 8204, 7970, 25552, 21657, 26492, 2411, 15088, 1905, 28899, 63380, 33935, 10480, 12686, 25501, 17694, 15701, 53062, 49908, 21612, 38949, 6216, 46863, 9235, 2201, 6985, 9883, 12238, 18057, 21617, 39228, 49928, 54476, 62113, 64316, 12264, 32362, 58198, 2887, 3205, 8557, 9600, 9693, 44867, 53058, 55556, 57658, 2208, 10252, 10302, 14218, 33877, 10317, 10485, 25964, 14815, 1363, 1397, 14827, 21708, 3801, 64698, 2179 or 13249 fusion proteins may be useful therapeutically for the treatment of disorders caused by, for example, (i) aberrant modification or mutation of a gene encoding a 15986, 2188, 20743, 9148, 9151, 9791, 44252, 14184, 42461, 8204, 7970, 25552, 21657, 26492, 2411, 15088, 1905, 28899, 63380, 33935, 10480, 12686, 25501, 17694, 15701, 53062, 49908, 21612, 38949, 6216, 46863, 9235, 2201, 6985, 9883, 12238, 18057, 21617, 39228, 49928, 54476, 62113, 64316, 12264, 32362, 58198, 2887, 3205, 8557, 9600, 9693, 44867, 53058, 55556, 57658, 2208, 10252, 10302, 14218, 33877, 10317, 10485, 25964, 14815, 1363, 1397, 14827, 21708, 3801, 64698, 2179 or 13249 protein; (ii) mis-regulation of the 15986, 2188, 20743, 9148, 9151, 9791, 44252, 14184, 42461, 8204, 7970, 25552, 21657, 26492, 2411, 15088, 1905, 28899, 63380, 33935, 10480, 12686, 25501, 17694, 15701, 53062, 49908, 21612, 38949, 6216, 46863, 9235, 2201, 6985, 9883, 12238, 18057, 21617, 39228, 49928, 54476, 62113, 64316, 12264, 32362, 58198, 2887, 3205, 8557, 9600, 9693, 44867, 53058, 55556, 57658, 2208, 10252, 10302, 14218, 33877, 10317, 10485, 25964, 14815, 1363, 1397, 14827, 21708, 3801, 64698, 2179 or 13249 gene; and (iii) aberrant post-translational modification of a 15986, 2188, 20743, 9148, 9151, 9791, 44252, 14184, 42461, 8204, 7970, 25552, 21657, 26492, 2411, 15088, 1905, 28899, 63380, 33935, 10480, 12686, 25501, 17694, 15701, 53062, 49908, 21612, 38949, 6216, 46863, 9235, 2201, 6985, 9883, 12238, 18057, 21617, 39228, 49928, 54476, 62113, 64316, 12264, 32362, 58198, 2887, 3205, 8557, 9600, 9693, 44867, 53058, 55556, 57658, 2208, 10252, 10302, 14218, 33877, 10317, 10485, 25964, 14815, 1363, 1397, 14827, 21708, 3801, 64698, 2179 or 13249 protein.

[1037] Moreover, the 15986, 2188, 20743, 9148, 9151, 9791, 44252, 14184, 42461, 8204, 7970, 25552, 21657, 26492, 2411, 15088, 1905, 28899, 63380, 33935, 10480, 12686, 25501, 17694, 15701, 53062, 49908, 21612, 38949, 6216, 46863, 9235, 2201, 6985, 9883, 12238, 18057, 21617, 39228, 49928, 54476, 62113, 64316, 12264, 32362, 58198, 2887, 3205, 8557, 9600, 9693, 44867, 53058, 55556, 57658, 2208, 10252, 10302, 14218, 33877, 10317, 10485, 25964, 14815, 1363, 1397, 14827, 21708, 3801, 64698, 2179 or 13249-fusion proteins used in the methods of the invention can be used as immunogens to produce anti-15986, 2188, 20743, 9148, 9151, 9791, 44252, 14184, 42461, 8204, 7970, 25552, 21657, 26492, 2411, 15088, 1905, 28899, 63380, 33935, 10480, 12686, 25501, 17694, 15701, 53062, 49908, 21612, 38949, 6216, 46863, 9235, 2201, 6985, 9883, 12238, 18057, 21617, 39228, 49928, 54476, 62113, 64316, 12264, 32362, 58198, 2887, 3205, 8557, 9600, 9693, 44867, 53058, 55556, 57658, 2208, 10252, 10302, 14218, 33877, 10317, 10485, 25964, 14815, 1363, 1397, 14827, 21708, 3801, 64698, 2179 or 13249 antibodies in a subject, to purify 15986, 2188, 20743, 9148, 9151, 9791, 44252, 14184, 42461, 8204, 7970, 25552, 21657, 26492, 2411, 15088, 1905, 28899, 63380, 33935, 10480, 12686, 25501, 17694, 15701, 53062, 49908, 21612, 38949, 6216, 46863, 9235, 2201, 6985, 9883, 12238, 18057, 21617, 39228, 49928, 54476, 62113, 64316, 12264, 32362, 58198, 2887, 3205, 8557, 9600, 9693, 44867, 53058, 55556, 57658, 2208, 10252, 10302, 14218, 33877, 10317, 10485, 25964, 14815, 1363, 1397, 14827, 21708, 3801, 64698, 2179 or 13249 ligands and in screening assays to identify molecules which inhibit the interaction of 15986, 2188, 20743, 9148, 9151, 9791, 44252, 14184, 42461, 8204, 7970, 25552, 21657, 26492, 2411, 15088, 1905, 28899, 63380, 33935, 10480, 12686, 25501, 17694, 15701, 53062, 49908, 21612, 38949, 6216, 46863, 9235, 2201, 6985, 9883, 12238, 18057, 21617, 39228, 49928, 54476, 62113, 64316, 12264, 32362, 58198, 2887, 3205, 8557, 9600, 9693, 44867, 53058, 55556, 57658, 2208, 10252, 10302, 14218, 33877, 10317, 10485, 25964, 14815, 1363, 1397, 14827, 21708, 3801, 64698, 2179 or 13249 with a 15986, 2188, 20743, 9148, 9151, 9791, 44252, 14184, 42461, 8204, 7970, 25552, 21657, 26492, 2411, 15088, 1905, 28899, 63380, 33935, 10480, 12686, 25501, 17694, 15701, 53062, 49908, 21612, 38949, 6216, 46863, 9235, 2201, 6985, 9883, 12238, 18057, 21617, 39228, 49928, 54476, 62113, 64316, 12264, 32362, 58198, 2887, 3205, 8557, 9600, 9693, 44867, 53058, 55556, 57658, 2208, 10252, 10302, 14218, 33877, 10317, 10485, 25964, 14815, 1363, 1397, 14827, 21708, 3801, 64698, 2179 or 13249 substrate.

[1038] Preferably, a 15986, 2188, 20743, 9148, 9151, 9791, 44252, 14184, 42461, 8204, 7970, 25552, 21657, 26492, 2411, 15088, 1905, 28899, 63380, 33935, 10480, 12686, 25501, 17694, 15701, 53062, 49908, 21612, 38949, 6216, 46863, 9235, 2201, 6985, 9883, 12238, 18057, 21617, 39228, 49928, 54476, 62113, 64316, 12264, 32362, 58198, 2887, 3205, 8557, 9600, 9693, 44867, 53058, 55556, 57658, 2208, 10252, 10302, 14218, 33877, 10317, 10485, 25964, 14815, 1363, 1397, 14827, 21708, 3801, 64698, 2179 or 13249 chimeric or fusion protein used in the methods of the invention is produced by standard recombinant DNA techniques. For example, DNA fragments coding for the different polypeptide sequences are ligated together in-frame in accordance with conventional techniques, for example by employing blunt-ended or stagger-ended termini for ligation, restriction enzyme digestion to provide for appropriate termini, filling-in of cohesive ends as appropriate, alkaline phosphatase treatment to avoid undesirable joining; and enzymatic ligation. In another embodiment, the fusion gene can be synthesized by conventional techniques including automated DNA synthesizers. Alternatively, PCR amplification of gene fragments can be carried out using anchor primers which give rise to complementary overhangs between two consecutive gene fragments which can subsequently be annealed and reamplified to generate a chimeric gene sequence (see, for example, Current Protocols in Molecular Biology, eds. Ausubel et al. John Wiley & Sons: 1992). Moreover, many expression vectors are commercially available that already encode a fusion moiety (e.g., a GST polypeptide). A 15986, 2188, 20743, 9148, 9151, 9791, 44252, 14184, 42461, 8204, 7970, 25552, 21657, 26492, 2411, 15088, 1905, 28899, 63380, 33935, 10480, 12686, 25501, 17694, 15701, 53062, 49908, 21612, 38949, 6216, 46863, 9235, 2201, 6985, 9883, 12238, 18057, 21617, 39228, 49928, 54476, 62113, 64316, 12264, 32362, 58198, 2887, 3205, 8557, 9600, 9693, 44867, 53058, 55556, 57658, 2208, 10252, 10302, 14218, 33877, 10317, 10485, 25964, 14815, 1363, 1397, 14827, 21708, 3801, 64698, 2179 or 13249-encoding nucleic acid can be cloned into such an expression vector such that the fusion moiety is linked in-frame to the 15986, 2188, 20743, 9148, 9151, 9791, 44252, 14184, 42461, 8204, 7970, 25552, 21657, 26492, 2411, 15088, 1905, 28899, 63380, 33935, 10480, 12686, 25501, 17694, 15701, 53062, 49908, 21612, 38949, 6216, 46863, 9235, 2201, 6985, 9883, 12238, 18057, 21617, 39228, 49928, 54476, 62113, 64316, 12264, 32362, 58198, 2887, 3205, 8557, 9600, 9693, 44867, 53058, 55556, 57658, 2208, 10252, 10302, 14218, 33877, 10317, 10485, 25964, 14815, 1363, 1397, 14827, 21708, 3801, 64698, 2179 or 13249 protein.

[1039] The present invention also pertains to the use of variants of the 15986, 2188, 20743, 9148, 9151, 9791, 44252, 14184, 42461, 8204, 7970, 25552, 21657, 26492, 2411, 15088, 1905, 28899, 63380, 33935, 10480, 12686, 25501, 17694, 15701, 53062, 49908, 21612, 38949, 6216, 46863, 9235, 2201, 6985, 9883, 12238, 18057, 21617, 39228, 49928, 54476, 62113, 64316, 12264, 32362, 58198, 2887, 3205, 8557, 9600, 9693, 44867, 53058, 55556, 57658, 2208, 10252, 10302, 14218, 33877, 10317, 10485, 25964, 14815, 1363, 1397, 14827, 21708, 3801, 64698, 2179 or 13249 proteins which function as either 15986, 2188, 20743, 9148, 9151, 9791, 44252, 14184, 42461, 8204, 7970, 25552, 21657, 26492, 2411, 15088, 1905, 28899, 63380, 33935, 10480, 12686, 25501, 17694, 15701, 53062, 49908, 21612, 38949, 6216, 46863, 9235, 2201, 6985, 9883, 12238, 18057, 21617, 39228, 49928, 54476, 62113, 64316, 12264, 32362, 58198, 2887, 3205, 8557, 9600, 9693, 44867, 53058, 55556, 57658, 2208, 10252, 10302, 14218, 33877, 10317, 10485, 25964, 14815, 1363, 1397, 14827, 21708, 3801, 64698, 2179 or 13249 agonists (mimetics) or as 15986, 2188, 20743, 9148, 9151, 9791, 44252, 14184, 42461, 8204, 7970, 25552, 21657, 26492, 2411, 15088, 1905, 28899, 63380, 33935, 10480, 12686, 25501, 17694, 15701, 53062, 49908, 21612, 38949, 6216, 46863, 9235, 2201, 6985, 9883, 12238, 18057, 21617, 39228, 49928, 54476, 62113, 64316, 12264, 32362, 58198, 2887, 3205, 8557, 9600, 9693, 44867, 53058, 55556, 57658, 2208, 10252, 10302, 14218, 33877, 10317, 10485, 25964, 14815, 1363, 1397, 14827, 21708, 3801, 64698, 2179 or 13249 antagonists. Variants of the 15986, 2188, 20743, 9148, 9151, 9791, 44252, 14184, 42461, 8204, 7970, 25552, 21657, 26492, 2411, 15088, 1905, 28899, 63380, 33935, 10480, 12686, 25501, 17694, 15701, 53062, 49908, 21612, 38949, 6216, 46863, 9235, 2201, 6985, 9883, 12238, 18057, 21617, 39228, 49928, 54476, 62113, 64316, 12264, 32362, 58198, 2887, 3205, 8557, 9600, 9693, 44867, 53058, 55556, 57658, 2208, 10252, 10302, 14218, 33877, 10317, 10485, 25964, 14815, 1363, 1397, 14827, 21708, 3801, 64698, 2179 or 13249 proteins can be generated by mutagenesis, e.g., discrete point mutation or truncation of a 15986, 2188, 20743, 9148, 9151, 9791, 44252, 14184, 42461, 8204, 7970, 25552, 21657, 26492, 2411, 15088, 1905, 28899, 63380, 33935, 10480, 12686, 25501, 17694, 15701, 53062, 49908, 21612, 38949, 6216, 46863, 9235, 2201, 6985, 9883, 12238, 18057, 21617, 39228, 49928, 54476, 62113, 64316, 12264, 32362, 58198, 2887, 3205, 8557, 9600, 9693, 44867, 53058, 55556, 57658, 2208, 10252, 10302, 14218, 33877, 10317, 10485, 25964, 14815, 1363, 1397, 14827, 21708, 3801, 64698, 2179 or 13249 protein. An agonist of the 15986, 2188, 20743, 9148, 9151, 9791, 44252, 14184, 42461, 8204, 7970, 25552, 21657, 26492, 2411, 15088, 1905, 28899, 63380, 33935, 10480, 12686, 25501, 17694, 15701, 53062, 49908, 21612, 38949, 6216, 46863, 9235, 2201, 6985, 9883, 12238, 18057, 21617, 39228, 49928, 54476, 62113, 64316, 12264, 32362, 58198, 2887, 3205, 8557, 9600, 9693, 44867, 53058, 55556, 57658, 2208, 10252, 10302, 14218, 33877, 10317, 10485, 25964, 14815, 1363, 1397, 14827, 21708, 3801, 64698, 2179 or 13249 proteins can retain substantially the same, or a subset, of the biological activities of the naturally occurring form of a 15986, 2188, 20743, 9148, 9151, 9791, 44252, 14184, 42461, 8204, 7970, 25552, 21657, 26492, 2411, 15088, 1905, 28899, 63380, 33935, 10480, 12686, 25501, 17694, 15701, 53062, 49908, 21612, 38949, 6216, 46863, 9235, 2201, 6985, 9883, 12238, 18057, 21617, 39228, 49928, 54476, 62113, 64316, 12264, 32362, 58198, 2887, 3205, 8557, 9600, 9693, 44867, 53058, 55556, 57658, 2208, 10252, 10302, 14218, 33877, 10317, 10485, 25964, 14815, 1363, 1397, 14827, 21708, 3801, 64698, 2179 or 13249 protein. An antagonist of a 15986, 2188, 20743, 9148, 9151, 9791, 44252, 14184, 42461, 8204, 7970, 25552, 21657, 26492, 2411, 15088, 1905, 28899, 63380, 33935, 10480, 12686, 25501, 17694, 15701, 53062, 49908, 21612, 38949, 6216, 46863, 9235, 2201, 6985, 9883, 12238, 18057, 21617, 39228, 49928, 54476, 62113, 64316, 12264, 32362, 58198, 2887, 3205, 8557, 9600, 9693, 44867, 53058, 55556, 57658, 2208, 10252, 10302, 14218, 33877, 10317, 10485, 25964, 14815, 1363, 1397, 14827, 21708, 3801, 64698, 2179 or 13249 protein can inhibit one or more of the activities of the naturally occurring form of the 15986, 2188, 20743, 9148, 9151, 9791, 44252, 14184, 42461, 8204, 7970, 25552, 21657, 26492, 2411, 15088, 1905, 28899, 63380, 33935, 10480, 12686, 25501, 17694, 15701, 53062, 49908, 21612, 38949, 6216, 46863, 9235, 2201, 6985, 9883, 12238, 18057, 21617, 39228, 49928, 54476, 62113, 64316, 12264, 32362, 58198, 2887, 3205, 8557, 9600, 9693, 44867, 53058, 55556, 57658, 2208, 10252, 10302, 14218, 33877, 10317, 10485, 25964, 14815, 1363, 1397, 14827, 21708, 3801, 64698, 2179 or 13249 protein by, for example, competitively modulating a 15986, 2188, 20743, 9148, 9151, 9791, 44252, 14184, 42461, 8204, 7970, 25552, 21657, 26492, 2411, 15088, 1905, 28899, 63380, 33935, 10480, 12686, 25501, 17694, 15701, 53062, 49908, 21612, 38949, 6216, 46863, 9235, 2201, 6985, 9883, 12238, 18057, 21617, 39228, 49928, 54476, 62113, 64316, 12264, 32362, 58198, 2887, 3205, 8557, 9600, 9693, 44867, 53058, 55556, 57658, 2208, 10252, 10302, 14218, 33877, 10317, 10485, 25964, 14815, 1363, 1397, 14827, 21708, 3801, 64698, 2179 or 13249-mediated activity of a 15986, 2188, 20743, 9148, 9151, 9791, 44252, 14184, 42461, 8204, 7970, 25552, 21657, 26492, 2411, 15088, 1905, 28899, 63380, 33935, 10480, 12686, 25501, 17694, 15701, 53062, 49908, 21612, 38949, 6216, 46863, 9235, 2201, 6985, 9883, 12238, 18057, 21617, 39228, 49928, 54476, 62113, 64316, 12264, 32362, 58198, 2887, 3205, 8557, 9600, 9693, 44867, 53058, 55556, 57658, 2208, 10252, 10302, 14218, 33877, 10317, 10485, 25964, 14815, 1363, 1397, 14827, 21708, 3801, 64698, 2179 or 13249 protein. Thus, specific biological effects can be elicited by treatment with a variant of limited function. In one embodiment, treatment of a subject with a variant having a subset of the biological activities of the naturally occurring form of the protein has fewer side effects in a subject relative to treatment with the naturally occurring form of the 15986, 2188, 20743, 9148, 9151, 9791, 44252, 14184, 42461, 8204, 7970, 25552, 21657, 26492, 2411, 15088, 1905, 28899, 63380, 33935, 10480, 12686, 25501, 17694, 15701, 53062, 49908, 21612, 38949, 6216, 46863, 9235, 2201, 6985, 9883, 12238, 18057, 21617, 39228, 49928, 54476, 62113, 64316, 12264, 32362, 58198, 2887, 3205, 8557, 9600, 9693, 44867, 53058, 55556, 57658, 2208, 10252, 10302, 14218, 33877, 10317, 10485, 25964, 14815, 1363, 1397, 14827, 21708, 3801, 64698, 2179 or 13249 protein.

[1040] In one embodiment, variants of a 15986, 2188, 20743, 9148, 9151, 9791, 44252, 14184, 42461, 8204, 7970, 25552, 21657, 26492, 2411, 15088, 1905, 28899, 63380, 33935, 10480, 12686, 25501, 17694, 15701, 53062, 49908, 21612, 38949, 6216, 46863, 9235, 2201, 6985, 9883, 12238, 18057, 21617, 39228, 49928, 54476, 62113, 64316, 12264, 32362, 58198, 2887, 3205, 8557, 9600, 9693, 44867, 53058, 55556, 57658, 2208, 10252, 10302, 14218, 33877, 10317, 10485, 25964, 14815, 1363, 1397, 14827, 21708, 3801, 64698, 2179 or 13249 protein which function as either 15986, 2188, 20743, 9148, 9151, 9791, 44252, 14184, 42461, 8204, 7970, 25552, 21657, 26492, 2411, 15088, 1905, 28899, 63380, 33935, 10480, 12686, 25501, 17694, 15701, 53062, 49908, 21612, 38949, 6216, 46863, 9235, 2201, 6985, 9883, 12238, 18057, 21617, 39228, 49928, 54476, 62113, 64316, 12264, 32362, 58198, 2887, 3205, 8557, 9600, 9693, 44867, 53058, 55556, 57658, 2208, 10252, 10302, 14218, 33877, 10317, 10485, 25964, 14815, 1363, 1397, 14827, 21708, 3801, 64698, 2179 or 13249 agonists (mimetics) or as 15986, 2188, 20743, 9148, 9151, 9791, 44252, 14184, 42461, 8204, 7970, 25552, 21657, 26492, 2411, 15088, 1905, 28899, 63380, 33935, 10480, 12686, 25501, 17694, 15701, 53062, 49908, 21612, 38949, 6216, 46863, 9235, 2201, 6985, 9883, 12238, 18057, 21617, 39228, 49928, 54476, 62113, 64316, 12264, 32362, 58198, 2887, 3205, 8557, 9600, 9693, 44867, 53058, 55556, 57658, 2208, 10252, 10302, 14218, 33877, 10317, 10485, 25964, 14815, 1363, 1397, 14827, 21708, 3801, 64698, 2179 or 13249 antagonists can be identified by screening combinatorial libraries of mutants, e.g., truncation mutants, of a 15986, 2188, 20743, 9148, 9151, 9791, 44252, 14184, 42461, 8204, 7970, 25552, 21657, 26492, 2411, 15088, 1905, 28899, 63380, 33935, 10480, 12686, 25501, 17694, 15701, 53062, 49908, 21612, 38949, 6216, 46863, 9235, 2201, 6985, 9883, 12238, 18057, 21617, 39228, 49928, 54476, 62113, 64316, 12264, 32362, 58198, 2887, 3205, 8557, 9600, 9693, 44867, 53058, 55556, 57658, 2208, 10252, 10302, 14218, 33877, 10317, 10485, 25964, 14815, 1363, 1397, 14827, 21708, 3801, 64698, 2179 or 13249 protein for 15986, 2188, 20743, 9148, 9151, 9791, 44252, 14184, 42461, 8204, 7970, 25552, 21657, 26492, 2411, 15088, 1905, 28899, 63380, 33935, 10480, 12686, 25501, 17694, 15701, 53062, 49908, 21612, 38949, 6216, 46863, 9235, 2201, 6985, 9883, 12238, 18057, 21617, 39228, 49928, 54476, 62113, 64316, 12264, 32362, 58198, 2887, 3205, 8557, 9600, 9693, 44867, 53058, 55556, 57658, 2208, 10252, 10302, 14218, 33877, 10317, 10485, 25964, 14815, 1363, 1397, 14827, 21708, 3801, 64698, 2179 or 13249 protein agonist or antagonist activity. In one embodiment, a variegated library of 15986, 2188, 20743, 9148, 9151, 9791, 44252, 14184, 42461, 8204, 7970, 25552, 21657, 26492, 2411, 15088, 1905, 28899, 63380, 33935, 10480, 12686, 25501, 17694, 15701, 53062, 49908, 21612, 38949, 6216, 46863, 9235, 2201, 6985, 9883, 12238, 18057, 21617, 39228, 49928, 54476, 62113, 64316, 12264, 32362, 58198, 2887, 3205, 8557, 9600, 9693, 44867, 53058, 55556, 57658, 2208, 10252, 10302, 14218, 33877, 10317, 10485, 25964, 14815, 1363, 1397, 14827, 21708, 3801, 64698, 2179 or 13249 variants is generated by combinatorial mutagenesis at the nucleic acid level and is encoded by a variegated gene library. A variegated library of 15986, 2188, 20743, 9148, 9151, 9791, 44252, 14184, 42461, 8204, 7970, 25552, 21657, 26492, 2411, 15088, 1905, 28899, 63380, 33935, 10480, 12686, 25501, 17694, 15701, 53062, 49908, 21612, 38949, 6216, 46863, 9235, 2201, 6985, 9883, 12238, 18057, 21617, 39228, 49928, 54476, 62113, 64316, 12264, 32362, 58198, 2887, 3205, 8557, 9600, 9693, 44867, 53058, 55556, 57658, 2208, 10252, 10302, 14218, 33877, 10317, 10485, 25964, 14815, 1363, 1397, 14827, 21708, 3801, 64698, 2179 or 13249 variants can be produced by, for example, enzymatically ligating a mixture of synthetic oligonucleotides into gene sequences such that a degenerate set of potential 15986, 2188, 20743, 9148, 9151, 9791, 44252, 14184, 42461, 8204, 7970, 25552, 21657, 26492, 2411, 15088, 1905, 28899, 63380, 33935, 10480, 12686, 25501, 17694, 15701, 53062, 49908, 21612, 38949, 6216, 46863, 9235, 2201, 6985, 9883, 12238, 18057, 21617, 39228, 49928, 54476, 62113, 64316, 12264, 32362, 58198, 2887, 3205, 8557, 9600, 9693, 44867, 53058, 55556, 57658, 2208, 10252, 10302, 14218, 33877, 10317, 10485, 25964, 14815, 1363, 1397, 14827, 21708, 3801, 64698, 2179 or 13249 sequences is expressible as individual polypeptides, or alternatively, as a set of larger fusion proteins (e.g., for phage display) containing the set of 15986, 2188, 20743, 9148, 9151, 9791, 44252, 14184, 42461, 8204, 7970, 25552, 21657, 26492, 2411, 15088, 1905, 28899, 63380, 33935, 10480, 12686, 25501, 17694, 15701, 53062, 49908, 21612, 38949, 6216, 46863, 9235, 2201, 6985, 9883, 12238, 18057, 21617, 39228, 49928, 54476, 62113, 64316, 12264, 32362, 58198, 2887, 3205, 8557, 9600, 9693, 44867, 53058, 55556, 57658, 2208, 10252, 10302, 14218, 33877, 10317, 10485, 25964, 14815, 1363, 1397, 14827, 21708, 3801, 64698, 2179 or 13249 sequences therein. There are a variety of methods which can be used to produce libraries of potential 15986, 2188, 20743, 9148, 9151, 9791, 44252, 14184, 42461, 8204, 7970, 25552, 21657, 26492, 2411, 15088, 1905, 28899, 63380, 33935, 10480, 12686, 25501, 17694, 15701, 53062, 49908, 21612, 38949, 6216, 46863, 9235, 2201, 6985, 9883, 12238, 18057, 21617, 39228, 49928, 54476, 62113, 64316, 12264, 32362, 58198, 2887, 3205, 8557, 9600, 9693, 44867, 53058, 55556, 57658, 2208, 10252, 10302, 14218, 33877, 10317, 10485, 25964, 14815, 1363, 1397, 14827, 21708, 3801, 64698, 2179 or 13249 variants from a degenerate oligonucleotide sequence. Chemical synthesis of a degenerate gene sequence can be performed in an automatic DNA synthesizer, and the synthetic gene then ligated into an appropriate expression vector. Use of a degenerate set of genes allows for the provision, in one mixture, of all of the sequences encoding the desired set of potential 15986, 2188, 20743, 9148, 9151, 9791, 44252, 14184, 42461, 8204, 7970, 25552, 21657, 26492, 2411, 15088, 1905, 28899, 63380, 33935, 10480, 12686, 25501, 17694, 15701, 53062, 49908, 21612, 38949, 6216, 46863, 9235, 2201, 6985, 9883, 12238, 18057, 21617, 39228, 49928, 54476, 62113, 64316, 12264, 32362, 58198, 2887, 3205, 8557, 9600, 9693, 44867, 53058, 55556, 57658, 2208, 10252, 10302, 14218, 33877, 10317, 10485, 25964, 14815, 1363, 1397, 14827, 21708, 3801, 64698, 2179 or 13249 sequences. Methods for synthesizing degenerate oligonucleotides are known in the art (see, e.g., Narang, S. A. (1983) Tetrahedron 39:3; Itakura et al. (1984) Annu. Rev. Biochem. 53:323; Itakura et al. (1984) Science 198:1056; Ike et al. (1983) Nucleic Acid Res. 11:477).

[1041] In addition, libraries of fragments of a 15986, 2188, 20743, 9148, 9151, 9791, 44252, 14184, 42461, 8204, 7970, 25552, 21657, 26492, 2411, 15088, 1905, 28899, 63380, 33935, 10480, 12686, 25501, 17694, 15701, 53062, 49908, 21612, 38949, 6216, 46863, 9235, 2201, 6985, 9883, 12238, 18057, 21617, 39228, 49928, 54476, 62113, 64316, 12264, 32362, 58198, 2887, 3205, 8557, 9600, 9693, 44867, 53058, 55556, 57658, 2208, 10252, 10302, 14218, 33877, 10317, 10485, 25964, 14815, 1363, 1397, 14827, 21708, 3801, 64698, 2179 or 13249 protein coding sequence can be used to generate a variegated population of 15986, 2188, 20743, 9148, 9151, 9791, 44252, 14184, 42461, 8204, 7970, 25552, 21657, 26492, 2411, 15088, 1905, 28899, 63380, 33935, 10480, 12686, 25501, 17694, 15701, 53062, 49908, 21612, 38949, 6216, 46863, 9235, 2201, 6985, 9883, 12238, 18057, 21617, 39228, 49928, 54476, 62113, 64316, 12264, 32362, 58198, 2887, 3205, 8557, 9600, 9693, 44867, 53058, 55556, 57658, 2208, 10252, 10302, 14218, 33877, 10317, 10485, 25964, 14815, 1363, 1397, 14827, 21708, 3801, 64698, 2179 or 13249 fragments for screening and subsequent selection of variants of a 15986, 2188, 20743, 9148, 9151, 9791, 44252, 14184, 42461, 8204, 7970, 25552, 21657, 26492, 2411, 15088, 1905, 28899, 63380, 33935, 10480, 12686, 25501, 17694, 15701, 53062, 49908, 21612, 38949, 6216, 46863, 9235, 2201, 6985, 9883, 12238, 18057, 21617, 39228, 49928, 54476, 62113, 64316, 12264, 32362, 58198, 2887, 3205, 8557, 9600, 9693, 44867, 53058, 55556, 57658, 2208, 10252, 10302, 14218, 33877, 10317, 10485, 25964, 14815, 1363, 1397, 14827, 21708, 3801, 64698, 2179 or 13249 protein. In one embodiment, a library of coding sequence fragments can be generated by treating a double stranded PCR fragment of a 15986, 2188, 20743, 9148, 9151, 9791, 44252, 14184, 42461, 8204, 7970, 25552, 21657, 26492, 2411, 15088, 1905, 28899, 63380, 33935, 10480, 12686, 25501, 17694, 15701, 53062, 49908, 21612, 38949, 6216, 46863, 9235, 2201, 6985, 9883, 12238, 18057, 21617, 39228, 49928, 54476, 62113, 64316, 12264, 32362, 58198, 2887, 3205, 8557, 9600, 9693, 44867, 53058, 55556, 57658, 2208, 10252, 10302, 14218, 33877, 10317, 10485, 25964, 14815, 1363, 1397, 14827, 21708, 3801, 64698, 2179 or 13249 coding sequence with a nuclease under conditions wherein nicking occurs only about once per molecule, denaturing the double stranded DNA, renaturing the DNA to form double stranded DNA which can include sense/antisense pairs from different nicked products, removing single stranded portions from reformed duplexes by treatment with S1 nuclease, and ligating the resulting fragment library into an expression vector. By this method, an expression library can be derived which encodes N-terminal, C-terminal and internal fragments of various sizes of the 15986, 2188, 20743, 9148, 9151, 9791, 44252, 14184, 42461, 8204, 7970, 25552, 21657, 26492, 2411, 15088, 1905, 28899, 63380, 33935, 10480, 12686, 25501, 17694, 15701, 53062, 49908, 21612, 38949, 6216, 46863, 9235, 2201, 6985, 9883, 12238, 18057, 21617, 39228, 49928, 54476, 62113, 64316, 12264, 32362, 58198, 2887, 3205, 8557, 9600, 9693, 44867, 53058, 55556, 57658, 2208, 10252, 10302, 14218, 33877, 10317, 10485, 25964, 14815, 1363, 1397, 14827, 21708, 3801, 64698, 2179 or 13249 protein.

[1042] Several techniques are known in the art for screening gene products of combinatorial libraries made by point mutations or truncation, and for screening cDNA libraries for gene products having a selected property. Such techniques are adaptable for rapid screening of the gene libraries generated by the combinatorial mutagenesis of 15986, 2188, 20743, 9148, 9151, 9791, 44252, 14184, 42461, 8204, 7970, 25552, 21657, 26492, 2411, 15088, 1905, 28899, 63380, 33935, 10480, 12686, 25501, 17694, 15701, 53062, 49908, 21612, 38949, 6216, 46863, 9235, 2201, 6985, 9883, 12238, 18057, 21617, 39228, 49928, 54476, 62113, 64316, 12264, 32362, 58198, 2887, 3205, 8557, 9600, 9693, 44867, 53058, 55556, 57658, 2208, 10252, 10302, 14218, 33877, 10317, 10485, 25964, 14815, 1363, 1397, 14827, 21708, 3801, 64698, 2179 or 13249 proteins. The most widely used techniques, which are amenable to high through-put analysis, for screening large gene libraries typically include cloning the gene library into replicable expression vectors, transforming appropriate cells with the resulting library of vectors, and expressing the combinatorial genes under conditions in which detection of a desired activity facilitates isolation of the vector encoding the gene whose product was detected. Recursive ensemble mutagenesis (REM), a new technique which enhances the frequency of functional mutants in the libraries, can be used in combination with the screening assays to identify 15986, 2188, 20743, 9148, 9151, 9791, 44252, 14184, 42461, 8204, 7970, 25552, 21657, 26492, 2411, 15088, 1905, 28899, 63380, 33935, 10480, 12686, 25501, 17694, 15701, 53062, 49908, 21612, 38949, 6216, 46863, 9235, 2201, 6985, 9883, 12238, 18057, 21617, 39228, 49928, 54476, 62113, 64316, 12264, 32362, 58198, 2887, 3205, 8557, 9600, 9693, 44867, 53058, 55556, 57658, 2208, 10252, 10302, 14218, 33877, 10317, 10485, 25964, 14815, 1363, 1397, 14827, 21708, 3801, 64698, 2179 or 13249 variants (Arkin and Yourvan (1992) Proc. Natl. Acad. Sci. USA 89:7811-7815; Delgrave et al. (1993) Protein Engineering 6(3):327-331).

[1043] The methods of the present invention further include the use of anti-15986, 2188, 20743, 9148, 9151, 9791, 44252, 14184, 42461, 8204, 7970, 25552, 21657, 26492, 2411, 15088, 1905, 28899, 63380, 33935, 10480, 12686, 25501, 17694, 15701, 53062, 49908, 21612, 38949, 6216, 46863, 9235, 2201, 6985, 9883, 12238, 18057, 21617, 39228, 49928, 54476, 62113, 64316, 12264, 32362, 58198, 2887, 3205, 8557, 9600, 9693, 44867, 53058, 55556, 57658, 2208, 10252, 10302, 14218, 33877, 10317, 10485, 25964, 14815, 1363, 1397, 14827, 21708, 3801, 64698, 2179 or 13249 antibodies. An isolated 15986, 2188, 20743, 9148, 9151, 9791, 44252, 14184, 42461, 8204, 7970, 25552, 21657, 26492, 2411, 15088, 1905, 28899, 63380, 33935, 10480, 12686, 25501, 17694, 15701, 53062, 49908, 21612, 38949, 6216, 46863, 9235, 2201, 6985, 9883, 12238, 18057, 21617, 39228, 49928, 54476, 62113, 64316, 12264, 32362, 58198, 2887, 3205, 8557, 9600, 9693, 44867, 53058, 55556, 57658, 2208, 10252, 10302, 14218, 33877, 10317, 10485, 25964, 14815, 1363, 1397, 14827, 21708, 3801, 64698, 2179 or 13249 protein, or a portion or fragment thereof, can be used as an immunogen to generate antibodies that bind 15986, 2188, 20743, 9148, 9151, 9791, 44252, 14184, 42461, 8204, 7970, 25552, 21657, 26492, 2411, 15088, 1905, 28899, 63380, 33935, 10480, 12686, 25501, 17694, 15701, 53062, 49908, 21612, 38949, 6216, 46863, 9235, 2201, 6985, 9883, 12238, 18057, 21617, 39228, 49928, 54476, 62113, 64316, 12264, 32362, 58198, 2887, 3205, 8557, 9600, 9693, 44867, 53058, 55556, 57658, 2208, 10252, 10302, 14218, 33877, 10317, 10485, 25964, 14815, 1363, 1397, 14827, 21708, 3801, 64698, 2179 or 13249 using standard techniques for polyclonal and monoclonal antibody preparation. A full-length 15986, 2188, 20743, 9148, 9151, 9791, 44252, 14184, 42461, 8204, 7970, 25552, 21657, 26492, 2411, 15088, 1905, 28899, 63380, 33935, 10480, 12686, 25501, 17694, 15701, 53062, 49908, 21612, 38949, 6216, 46863, 9235, 2201, 6985, 9883, 12238, 18057, 21617, 39228, 49928, 54476, 62113, 64316, 12264, 32362, 58198, 2887, 3205, 8557, 9600, 9693, 44867, 53058, 55556, 57658, 2208, 10252, 10302, 14218, 33877, 10317, 10485, 25964, 14815, 1363, 1397, 14827, 21708, 3801, 64698, 2179 or 13249 protein can be used or, alternatively, antigenic peptide fragments of 15986, 2188, 20743, 9148, 9151, 9791, 44252, 14184, 42461, 8204, 7970, 25552, 21657, 26492, 2411, 15088, 1905, 28899, 63380, 33935, 10480, 12686, 25501, 17694, 15701, 53062, 49908, 21612, 38949, 6216, 46863, 9235, 2201, 6985, 9883, 12238, 18057, 21617, 39228, 49928, 54476, 62113, 64316, 12264, 32362, 58198, 2887, 3205, 8557, 9600, 9693, 44867, 53058, 55556, 57658, 2208, 10252, 10302, 14218, 33877, 10317, 10485, 25964, 14815, 1363, 1397, 14827, 21708, 3801, 64698, 2179 or 13249 can be used as immunogens. The antigenic peptide of 15986, 2188, 20743, 9148, 9151, 9791, 44252, 14184, 42461, 8204, 7970, 25552, 21657, 26492, 2411, 15088, 1905, 28899, 63380, 33935, 10480, 12686, 25501, 17694, 15701, 53062, 49908, 21612, 38949, 6216, 46863, 9235, 2201, 6985, 9883, 12238, 18057, 21617, 39228, 49928, 54476, 62113, 64316, 12264, 32362, 58198, 2887, 3205, 8557, 9600, 9693, 44867, 53058, 55556, 57658, 2208, 10252, 10302, 14218, 33877, 10317, 10485, 25964, 14815, 1363, 1397, 14827, 21708, 3801, 64698, 2179 or 13249 comprises at least 8 amino acid residues of the amino acid sequence shown in SEQ ID NO:2, 4, 6, 8, 10, 12, 14, 16, 18, 20, 22, 24, 26, 28, 30, 32, 34, 36, 38, 40, 42, 44, 46, 48, 50, 52, 54, 56, 58, 60, 62, 64, 66, 68, 70, 72, 74, 76, 78, 80, 82, 84, 86, 88, 90, 92, 94, 96, 98, 100, 102, 104, 106, 108, 110, 112, 114, 116, 118, 120, 122, 124, 126, 128, 130, 132, 134, 136, 138, 140, 142 or 144 and encompasses an epitope of 15986, 2188, 20743, 9148, 9151, 9791, 44252, 14184, 42461, 8204, 7970, 25552, 21657, 26492, 2411, 15088, 1905, 28899, 63380, 33935, 10480, 12686, 25501, 17694, 15701, 53062, 49908, 21612, 38949, 6216, 46863, 9235, 2201, 6985, 9883, 12238, 18057, 21617, 39228, 49928, 54476, 62113, 64316, 12264, 32362, 58198, 2887, 3205, 8557, 9600, 9693, 44867, 53058, 55556, 57658, 2208, 10252, 10302, 14218, 33877, 10317, 10485, 25964, 14815, 1363, 1397, 14827, 21708, 3801, 64698, 2179 or 13249 such that an antibody raised against the peptide forms a specific immune complex with the 15986, 2188, 20743, 9148, 9151, 9791, 44252, 14184, 42461, 8204, 7970, 25552, 21657, 26492, 2411, 15088, 1905, 28899, 63380, 33935, 10480, 12686, 25501, 17694, 15701, 53062, 49908, 21612, 38949, 6216, 46863, 9235, 2201, 6985, 9883, 12238, 18057, 21617, 39228, 49928, 54476, 62113, 64316, 12264, 32362, 58198, 2887, 3205, 8557, 9600, 9693, 44867, 53058, 55556, 57658, 2208, 10252, 10302, 14218, 33877, 10317, 10485, 25964, 14815, 1363, 1397, 14827, 21708, 3801, 64698, 2179 or 13249 protein. Preferably, the antigenic peptide comprises at least 10 amino acid residues, more preferably at least 15 amino acid residues, even more preferably at least 20 amino acid residues, and most preferably at least 30 amino acid residues.

[1044] Preferred epitopes encompassed by the antigenic peptide are regions of 15986, 2188, 20743, 9148, 9151, 9791, 44252, 14184, 42461, 8204, 7970, 25552, 21657, 26492, 2411, 15088, 1905, 28899, 63380, 33935, 10480, 12686, 25501, 17694, 15701, 53062, 49908, 21612, 38949, 6216, 46863, 9235, 2201, 6985, 9883, 12238, 18057, 21617, 39228, 49928, 54476, 62113, 64316, 12264, 32362, 58198, 2887, 3205, 8557, 9600, 9693, 44867, 53058, 55556, 57658, 2208, 10252, 10302, 14218, 33877, 10317, 10485, 25964, 14815, 1363, 1397, 14827, 21708, 3801, 64698, 2179 or 13249 that are located on the surface of the protein, e.g., hydrophilic regions, as well as regions with high antigenicity.

[1045] A 15986, 2188, 20743, 9148, 9151, 9791, 44252, 14184, 42461, 8204, 7970, 25552, 21657, 26492, 2411, 15088, 1905, 28899, 63380, 33935, 10480, 12686, 25501, 17694, 15701, 53062, 49908, 21612, 38949, 6216, 46863, 9235, 2201, 6985, 9883, 12238, 18057, 21617, 39228, 49928, 54476, 62113, 64316, 12264, 32362, 58198, 2887, 3205, 8557, 9600, 9693, 44867, 53058, 55556, 57658, 2208, 10252, 10302, 14218, 33877, 10317, 10485, 25964, 14815, 1363, 1397, 14827, 21708, 3801, 64698, 2179 or 13249 immunogen is typically used to prepare antibodies by immunizing a suitable subject, (e.g., rabbit, goat, mouse, or other mammal) with the immunogen. An appropriate immunogenic preparation can contain, for example, recombinantly expressed 15986, 2188, 20743, 9148, 9151, 9791, 44252, 14184, 42461, 8204, 7970, 25552, 21657, 26492, 2411, 15088, 1905, 28899, 63380, 33935, 10480, 12686, 25501, 17694, 15701, 53062, 49908, 21612, 38949, 6216, 46863, 9235, 2201, 6985, 9883, 12238, 18057, 21617, 39228, 49928, 54476, 62113, 64316, 12264, 32362, 58198, 2887, 3205, 8557, 9600, 9693, 44867, 53058, 55556, 57658, 2208, 10252, 10302, 14218, 33877, 10317, 10485, 25964, 14815, 1363, 1397, 14827, 21708, 3801, 64698, 2179 or 13249 protein or a chemically synthesized 15986, 2188, 20743, 9148, 9151, 9791, 44252, 14184, 42461, 8204, 7970, 25552, 21657, 26492, 2411, 15088, 1905, 28899, 63380, 33935, 10480, 12686, 25501, 17694, 15701, 53062, 49908, 21612, 38949, 6216, 46863, 9235, 2201, 6985, 9883, 12238, 18057, 21617, 39228, 49928, 54476, 62113, 64316, 12264, 32362, 58198, 2887, 3205, 8557, 9600, 9693, 44867, 53058, 55556, 57658, 2208, 10252, 10302, 14218, 33877, 10317, 10485, 25964, 14815, 1363, 1397, 14827, 21708, 3801, 64698, 2179 or 13249 polypeptide. The preparation can further include an adjuvant, such as Freund's complete or incomplete adjuvant, or similar immunostimulatory agent. Immunization of a suitable subject with an immunogenic 15986, 2188, 20743, 9148, 9151, 9791, 44252, 14184, 42461, 8204, 7970, 25552, 21657, 26492, 2411, 15088, 1905, 28899, 63380, 33935, 10480, 12686, 25501, 17694, 15701, 53062, 49908, 21612, 38949, 6216, 46863, 9235, 2201, 6985, 9883, 12238, 18057, 21617, 39228, 49928, 54476, 62113, 64316, 12264, 32362, 58198, 2887, 3205, 8557, 9600, 9693, 44867, 53058, 55556, 57658, 2208, 10252, 10302, 14218, 33877, 10317, 10485, 25964, 14815, 1363, 1397, 14827, 21708, 3801, 64698, 2179 or 13249 preparation induces a polyclonal anti-15986, 2188, 20743, 9148, 9151, 9791, 44252, 14184, 42461, 8204, 7970, 25552, 21657, 26492, 2411, 15088, 1905, 28899, 63380, 33935, 10480, 12686, 25501, 17694, 15701, 53062, 49908, 21612, 38949, 6216, 46863, 9235, 2201, 6985, 9883, 12238, 18057, 21617, 39228, 49928, 54476, 62113, 64316, 12264, 32362, 58198, 2887, 3205, 8557, 9600, 9693, 44867, 53058, 55556, 57658, 2208, 10252, 10302, 14218, 33877, 10317, 10485, 25964, 14815, 1363, 1397, 14827, 21708, 3801, 64698, 2179 or 13249 antibody response.

[1046] The term “antibody” as used herein refers to immunoglobulin molecules and immunologically active portions of immunoglobulin molecules, i.e., molecules that contain an antigen binding site which specifically binds (immunoreacts with) an antigen, such as a 15986, 2188, 20743, 9148, 9151, 9791, 44252, 14184, 42461, 8204, 7970, 25552, 21657, 26492, 2411, 15088, 1905, 28899, 63380, 33935, 10480, 12686, 25501, 17694, 15701, 53062, 49908, 21612, 38949, 6216, 46863, 9235, 2201, 6985, 9883, 12238, 18057, 21617, 39228, 49928, 54476, 62113, 64316, 12264, 32362, 58198, 2887, 3205, 8557, 9600, 9693, 44867, 53058, 55556, 57658, 2208, 10252, 10302, 14218, 33877, 10317, 10485, 25964, 14815, 1363, 1397, 14827, 21708, 3801, 64698, 2179 or 13249. Examples of immunologically active portions of immunoglobulin molecules include F(ab) and F(ab′)₂ fragments which can be generated by treating the antibody with an enzyme such as pepsin. The invention provides polyclonal and monoclonal antibodies that bind 15986, 2188, 20743, 9148, 9151, 9791, 44252, 14184, 42461, 8204, 7970, 25552, 21657, 26492, 2411, 15088, 1905, 28899, 63380, 33935, 10480, 12686, 25501, 17694, 15701, 53062, 49908, 21612, 38949, 6216, 46863, 9235, 2201, 6985, 9883, 12238, 18057, 21617, 39228, 49928, 54476, 62113, 64316, 12264, 32362, 58198, 2887, 3205, 8557, 9600, 9693, 44867, 53058, 55556, 57658, 2208, 10252, 10302, 14218, 33877, 10317, 10485, 25964, 14815, 1363, 1397, 14827, 21708, 3801, 64698, 2179 or 13249 molecules. The term “monoclonal antibody” or “monoclonal antibody composition”, as used herein, refers to a population of antibody molecules that contain only one species of an antigen binding site capable of immunoreacting with a particular epitope of 15986, 2188, 20743, 9148, 9151, 9791, 44252, 14184, 42461, 8204, 7970, 25552, 21657, 26492, 2411, 15088, 1905, 28899, 63380, 33935, 10480, 12686, 25501, 17694, 15701, 53062, 49908, 21612, 38949, 6216, 46863, 9235, 2201, 6985, 9883, 12238, 18057, 21617, 39228, 49928, 54476, 62113, 64316, 12264, 32362, 58198, 2887, 3205, 8557, 9600, 9693, 44867, 53058, 55556, 57658, 2208, 10252, 10302, 14218, 33877, 10317, 10485, 25964, 14815, 1363, 1397, 14827, 21708, 3801, 64698, 2179 or 13249. A monoclonal antibody composition thus typically displays a single binding affinity for a particular 15986, 2188, 20743, 9148, 9151, 9791, 44252, 14184, 42461, 8204, 7970, 25552, 21657, 26492, 2411, 15088, 1905, 28899, 63380, 33935, 10480, 12686, 25501, 17694, 15701, 53062, 49908, 21612, 38949, 6216, 46863, 9235, 2201, 6985, 9883, 12238, 18057, 21617, 39228, 49928, 54476, 62113, 64316, 12264, 32362, 58198, 2887, 3205, 8557, 9600, 9693, 44867, 53058, 55556, 57658, 2208, 10252, 10302, 14218, 33877, 10317, 10485, 25964, 14815, 1363, 1397, 14827, 21708, 3801, 64698, 2179 or 13249 protein with which it immunoreacts.

[1047] Polyclonal anti-15986, 2188, 20743, 9148, 9151, 9791, 44252, 14184, 42461, 8204, 7970, 25552, 21657, 26492, 2411, 15088, 1905, 28899, 63380, 33935, 10480, 12686, 25501, 17694, 15701, 53062, 49908, 21612, 38949, 6216, 46863, 9235, 2201, 6985, 9883, 12238, 18057, 21617, 39228, 49928, 54476, 62113, 64316, 12264, 32362, 58198, 2887, 3205, 8557, 9600, 9693, 44867, 53058, 55556, 57658, 2208, 10252, 10302, 14218, 33877, 10317, 10485, 25964, 14815, 1363, 1397, 14827, 21708, 3801, 64698, 2179 or 13249 antibodies can be prepared as described above by immunizing a suitable subject with a 15986, 2188, 20743, 9148, 9151, 9791, 44252, 14184, 42461, 8204, 7970, 25552, 21657, 26492, 2411, 15088, 1905, 28899, 63380, 33935, 10480, 12686, 25501, 17694, 15701, 53062, 49908, 21612, 38949, 6216, 46863, 9235, 2201, 6985, 9883, 12238, 18057, 21617, 39228, 49928, 54476, 62113, 64316, 12264, 32362, 58198, 2887, 3205, 8557, 9600, 9693, 44867, 53058, 55556, 57658, 2208, 10252, 10302, 14218, 33877, 10317, 10485, 25964, 14815, 1363, 1397, 14827, 21708, 3801, 64698, 2179 or 13249 immunogen. The anti-15986, 2188, 20743, 9148, 9151, 9791, 44252, 14184, 42461, 8204, 7970, 25552, 21657, 26492, 2411, 15088, 1905, 28899, 63380, 33935, 10480, 12686, 25501, 17694, 15701, 53062, 49908, 21612, 38949, 6216, 46863, 9235, 2201, 6985, 9883, 12238, 18057, 21617, 39228, 49928, 54476, 62113, 64316, 12264, 32362, 58198, 2887, 3205, 8557, 9600, 9693, 44867, 53058, 55556, 57658, 2208, 10252, 10302, 14218, 33877, 10317, 10485, 25964, 14815, 1363, 1397, 14827, 21708, 3801, 64698, 2179 or 13249 antibody titer in the immunized subject can be monitored over time by standard techniques, such as with an enzyme linked immunosorbent assay (ELISA) using immobilized 15986, 2188, 20743, 9148, 9151, 9791, 44252, 14184, 42461, 8204, 7970, 25552, 21657, 26492, 2411, 15088, 1905, 28899, 63380, 33935, 10480, 12686, 25501, 17694, 15701, 53062, 49908, 21612, 38949, 6216, 46863, 9235, 2201, 6985, 9883, 12238, 18057, 21617, 39228, 49928, 54476, 62113, 64316, 12264, 32362, 58198, 2887, 3205, 8557, 9600, 9693, 44867, 53058, 55556, 57658, 2208, 10252, 10302, 14218, 33877, 10317, 10485, 25964, 14815, 1363, 1397, 14827, 21708, 3801, 64698, 2179 or 13249. If desired, the antibody molecules directed against 15986, 2188, 20743, 9148, 9151, 9791, 44252, 14184, 42461, 8204, 7970, 25552, 21657, 26492, 2411, 15088, 1905, 28899, 63380, 33935, 10480, 12686, 25501, 17694, 15701, 53062, 49908, 21612, 38949, 6216, 46863, 9235, 2201, 6985, 9883, 12238, 18057, 21617, 39228, 49928, 54476, 62113, 64316, 12264, 32362, 58198, 2887, 3205, 8557, 9600, 9693, 44867, 53058, 55556, 57658, 2208, 10252, 10302, 14218, 33877, 10317, 10485, 25964, 14815, 1363, 1397, 14827, 21708, 3801, 64698, 2179 or 13249 can be isolated from the mammal (e.g., from the blood) and further purified by well known techniques, such as protein A chromatography to obtain the IgG fraction. At an appropriate time after immunization, e.g., when the anti-15986, 2188, 20743, 9148, 9151, 9791, 44252, 14184, 42461, 8204, 7970, 25552, 21657, 26492, 2411, 15088, 1905, 28899, 63380, 33935, 10480, 12686, 25501, 17694, 15701, 53062, 49908, 21612, 38949, 6216, 46863, 9235, 2201, 6985, 9883, 12238, 18057, 21617, 39228, 49928, 54476, 62113, 64316, 12264, 32362, 58198, 2887, 3205, 8557, 9600, 9693, 44867, 53058, 55556, 57658, 2208, 10252, 10302, 14218, 33877, 10317, 10485, 25964, 14815, 1363, 1397, 14827, 21708, 3801, 64698, 2179 or 13249 antibody titers are highest, antibody-producing cells can be obtained from the subject and used to prepare monoclonal antibodies by standard techniques, such as the hybridoma technique originally described by Kohler and Milstein (1975) Nature 256:495-497) (see also, Brown et al. (1981) J. Immunol. 127:539-46; Brown et al. (1980) J. Biol. Chem. 255:4980-83; Yeh et al. (1976) Proc. Natl. Acad. Sci. USA 76:2927-31; and Yeh et al. (1982) Int. J. Cancer 29:269-75), the more recent human B cell hybridoma technique (Kozbor et al. (1983) Immunol Today 4:72), the EBV-hybridoma technique (Cole et al. (1985) Monoclonal Antibodies and Cancer Therapy, Alan R. Liss, Inc., pp. 77-96) or trioma techniques. The technology for producing monoclonal antibody hybridomas is well known (see generally Kenneth, R. H. in Monoclonal Antibodies: A New Dimension In Biological Analyses, Plenum Publishing Corp., New York, N.Y. (1980); Lerner, E. A. (1981) Yale J. Biol. Med. 54:387-402; Gefter, M. L. et al. (1977) Somatic Cell Genet. 3:231-36). Briefly, an immortal cell line (typically a myeloma) is fused to lymphocytes (typically splenocytes) from a mammal immunized with a 15986, 2188, 20743, 9148, 9151, 9791, 44252, 14184, 42461, 8204, 7970, 25552, 21657, 26492, 2411, 15088, 1905, 28899, 63380, 33935, 10480, 12686, 25501, 17694, 15701, 53062, 49908, 21612, 38949, 6216, 46863, 9235, 2201, 6985, 9883, 12238, 18057, 21617, 39228, 49928, 54476, 62113, 64316, 12264, 32362, 58198, 2887, 3205, 8557, 9600, 9693, 44867, 53058, 55556, 57658, 2208, 10252, 10302, 14218, 33877, 10317, 10485, 25964, 14815, 1363, 1397, 14827, 21708, 3801, 64698, 2179 or 13249 immunogen as described above, and the culture supernatants of the resulting hybridoma cells are screened to identify a hybridoma producing a monoclonal antibody that binds 15986, 2188, 20743, 9148, 9151, 9791, 44252, 14184, 42461, 8204, 7970, 25552, 21657, 26492, 2411, 15088, 1905, 28899, 63380, 33935, 10480, 12686, 25501, 17694, 15701, 53062, 49908, 21612, 38949, 6216, 46863, 9235, 2201, 6985, 9883, 12238, 18057, 21617, 39228, 49928, 54476, 62113, 64316, 12264, 32362, 58198, 2887, 3205, 8557, 9600, 9693, 44867, 53058, 55556, 57658, 2208, 10252, 10302, 14218, 33877, 10317, 10485, 25964, 14815, 1363, 1397, 14827, 21708, 3801, 64698, 2179 or 13249.

[1048] Any of the many well known protocols used for fusing lymphocytes and immortalized cell lines can be applied for the purpose of generating an anti-15986, 2188, 20743, 9148, 9151, 9791, 44252, 14184, 42461, 8204, 7970, 25552, 21657, 26492, 2411, 15088, 1905, 28899, 63380, 33935, 10480, 12686, 25501, 17694, 15701, 53062, 49908, 21612, 38949, 6216, 46863, 9235, 2201, 6985, 9883, 12238, 18057, 21617, 39228, 49928, 54476, 62113, 64316, 12264, 32362, 58198, 2887, 3205, 8557, 9600, 9693, 44867, 53058, 55556, 57658, 2208, 10252, 10302, 14218, 33877, 10317, 10485, 25964, 14815, 1363, 1397, 14827, 21708, 3801, 64698, 2179 or 13249 monoclonal antibody (see, e.g., G. Galfre et al. (1977) Nature 266:55052; Gefter et al. (1977) supra; Lerner (1981) supra; and Kenneth (1980) supra). Moreover, the ordinarily skilled worker will appreciate that there are many variations of such methods which also would be useful. Typically, the immortal cell line (e.g., a myeloma cell line) is derived from the same mammalian species as the lymphocytes. For example, murine hybridomas can be made by fusing lymphocytes from a mouse immunized with an immunogenic preparation of the present invention with an immortalized mouse cell line. Preferred immortal cell lines are mouse myeloma cell lines that are sensitive to culture medium containing hypoxanthine, aminopterin and thymidine (“HAT medium”). Any of a number of myeloma cell lines can be used as a fusion partner according to standard techniques, e.g., the P3-NS1/1-Ag4-1, P3-x63-Ag8.653 or Sp2/O-Ag14 myeloma lines. These myeloma lines are available from ATCC. Typically, HAT-sensitive mouse myeloma cells are fused to mouse splenocytes using polyethylene glycol (“PEG”). Hybridoma cells resulting from the fusion are then selected using HAT medium, which kills unfused and unproductively fused myeloma cells (unfused splenocytes die after several days because they are not transformed). Hybridoma cells producing a monoclonal antibody of the invention are detected by screening the hybridoma culture supernatants for antibodies that bind 15986, 2188, 20743, 9148, 9151, 9791, 44252, 14184, 42461, 8204, 7970, 25552, 21657, 26492, 2411, 15088, 1905, 28899, 63380, 33935, 10480, 12686, 25501, 17694, 15701, 53062, 49908, 21612, 38949, 6216, 46863, 9235, 2201, 6985, 9883, 12238, 18057, 21617, 39228, 49928, 54476, 62113, 64316, 12264, 32362, 58198, 2887, 3205, 8557, 9600, 9693, 44867, 53058, 55556, 57658, 2208, 10252, 10302, 14218, 33877, 10317, 10485, 25964, 14815, 1363, 1397, 14827, 21708, 3801, 64698, 2179 or 13249, e.g., using a standard ELISA assay.

[1049] Alternative to preparing monoclonal antibody-secreting hybridomas, a monoclonal anti-15986, 2188, 20743, 9148, 9151, 9791, 44252, 14184, 42461, 8204, 7970, 25552, 21657, 26492, 2411, 15088, 1905, 28899, 63380, 33935, 10480, 12686, 25501, 17694, 15701, 53062, 49908, 21612, 38949, 6216, 46863, 9235, 2201, 6985, 9883, 12238, 18057, 21617, 39228, 49928, 54476, 62113, 64316, 12264, 32362, 58198, 2887, 3205, 8557, 9600, 9693, 44867, 53058, 55556, 57658, 2208, 10252, 10302, 14218, 33877, 10317, 10485, 25964, 14815, 1363, 1397, 14827, 21708, 3801, 64698, 2179 or 13249 antibody can be identified and isolated by screening a recombinant combinatorial immunoglobulin library (e.g., an antibody phage display library) with 15986, 2188, 20743, 9148, 9151, 9791, 44252, 14184, 42461, 8204, 7970, 25552, 21657, 26492, 2411, 15088, 1905, 28899, 63380, 33935, 10480, 12686, 25501, 17694, 15701, 53062, 49908, 21612, 38949, 6216, 46863, 9235, 2201, 6985, 9883, 12238, 18057, 21617, 39228, 49928, 54476, 62113, 64316, 12264, 32362, 58198, 2887, 3205, 8557, 9600, 9693, 44867, 53058, 55556, 57658, 2208, 10252, 10302, 14218, 33877, 10317, 10485, 25964, 14815, 1363, 1397, 14827, 21708, 3801, 64698, 2179 or 13249 to thereby isolate immunoglobulin library members that bind 15986, 2188, 20743, 9148, 9151, 9791, 44252, 14184, 42461, 8204, 7970, 25552, 21657, 26492, 2411, 15088, 1905, 28899, 63380, 33935, 10480, 12686, 25501, 17694, 15701, 53062, 49908, 21612, 38949, 6216, 46863, 9235, 2201, 6985, 9883, 12238, 18057, 21617, 39228, 49928, 54476, 62113, 64316, 12264, 32362, 58198, 2887, 3205, 8557, 9600, 9693, 44867, 53058, 55556, 57658, 2208, 10252, 10302, 14218, 33877, 10317, 10485, 25964, 14815, 1363, 1397, 14827, 21708, 3801, 64698, 2179 or 13249. Kits for generating and screening phage display libraries are commercially available (e.g., the Pharmacia Recombinant Phage Antibody System, Catalog No. 27-9400-01; and the Stratagene SurfZAP™ Phage Display Kit, Catalog No. 240612). Additionally, examples of methods and reagents particularly amenable for use in generating and screening antibody display library can be found in, for example, Ladner et al. U.S. Pat. No. 5,223,409; Kang et al. PCT International Publication No. WO 92/18619; Dower et al. PCT International Publication No. WO 91/17271; Winter et al. PCT International Publication WO 92/20791; Markland et al. PCT International Publication No. WO 92/15679; Breitling et al. PCT International Publication WO 93/01288; McCafferty et al. PCT International Publication No. WO 92/01047; Garrard et al. PCT International Publication No. WO 92/09690; Ladner et al. PCT International Publication No. WO 90/02809; Fuchs et al. (1991) Bio/Technology 9:1370-1372; Hay et al. (1992) Hum. Antibod. Hybridomas 3:81-85; Huse et al. (1989) Science 246:1275-1281; Griffiths et al. (1993) EMBO J. 12:725-734; Hawkins et al. (1992) J. Mol. Biol. 226:889-896; Clarkson et al. (1991) Nature 352:624-628; Gram et al. (1992) Proc. Natl. Acad. Sci. USA 89:3576-3580; Garrad et al. (1991) Bio/Technology 9:1373-1377; Hoogenboom et al. (1991) Nuc. Acid Res. 19:4133-4137; Barbas et al. (1991) Proc. Natl. Acad. Sci. USA 88:7978-7982; and McCafferty et al. (1990) Nature 348:552-554.

[1050] Additionally, recombinant anti-15986, 2188, 20743, 9148, 9151, 9791, 44252, 14184, 42461, 8204, 7970, 25552, 21657, 26492, 2411, 15088, 1905, 28899, 63380, 33935, 10480, 12686, 25501, 17694, 15701, 53062, 49908, 21612, 38949, 6216, 46863, 9235, 2201, 6985, 9883, 12238, 18057, 21617, 39228, 49928, 54476, 62113, 64316, 12264, 32362, 58198, 2887, 3205, 8557, 9600, 9693, 44867, 53058, 55556, 57658, 2208, 10252, 10302, 14218, 33877, 10317, 10485, 25964, 14815, 1363, 1397, 14827, 21708, 3801, 64698, 2179 or 13249 antibodies, such as chimeric and humanized monoclonal antibodies, comprising both human and non-human portions, which can be made using standard recombinant DNA techniques, are within the scope of the methods of the invention. Such chimeric and humanized monoclonal antibodies can be produced by recombinant DNA techniques known in the art, for example using methods described in Robinson et al. International Application No. PCT/US86/02269; Akira, et al. European Patent Application 184, 187; Taniguchi, M., European Patent Application 171, 496; Morrison et al. European Patent Application 173, 494; Neuberger et al. PCT International Publication No. WO 86/01533; Cabilly et al. U.S. Pat. No. 4,816,567; Cabilly et al. European Patent Application 125, 023; Better et al. (1988) Science 240:1041-1043; Liu et al. (1987) Proc. Natl. Acad. Sci. USA 84:3439-3443; Liu et al. (1987) J. Immunol. 139:3521-3526; Sun et al. (1987) Proc. Natl. Acad. Sci. USA 84:214-218; Nishimura et al. (1987) Canc. Res. 47:999-1005; Wood et al. (1985) Nature 314:446-449; Shaw et al. (1988) J. Natl. Cancer Inst. 80:1553-1559; Morrison, S. L. (1985) Science 229:1202-1207; Oi et al. (1986) BioTechniques 4:214; Winter U.S. Pat. No. 5,225,539; Jones et al. (1986) Nature 321:552-525; Verhoeyan et al. (1988) Science 239:1534; and Beidler et al. (1988) J. Immunol. 141:4053-4060.

[1051] An anti-15986, 2188, 20743, 9148, 9151, 9791, 44252, 14184, 42461, 8204, 7970, 25552, 21657, 26492, 2411, 15088, 1905, 28899, 63380, 33935, 10480, 12686, 25501, 17694, 15701, 53062, 49908, 21612, 38949, 6216, 46863, 9235, 2201, 6985, 9883, 12238, 18057, 21617, 39228, 49928, 54476, 62113, 64316, 12264, 32362, 58198, 2887, 3205, 8557, 9600, 9693, 44867, 53058, 55556, 57658, 2208, 10252, 10302, 14218, 33877, 10317, 10485, 25964, 14815, 1363, 1397, 14827, 21708, 3801, 64698, 2179 or 13249 antibody can be used to detect 15986, 2188, 20743, 9148, 9151, 9791, 44252, 14184, 42461, 8204, 7970, 25552, 21657, 26492, 2411, 15088, 1905, 28899, 63380, 33935, 10480, 12686, 25501, 17694, 15701, 53062, 49908, 21612, 38949, 6216, 46863, 9235, 2201, 6985, 9883, 12238, 18057, 21617, 39228, 49928, 54476, 62113, 64316, 12264, 32362, 58198, 2887, 3205, 8557, 9600, 9693, 44867, 53058, 55556, 57658, 2208, 10252, 10302, 14218, 33877, 10317, 10485, 25964, 14815, 1363, 1397, 14827, 21708, 3801, 64698, 2179 or 13249 protein (e.g., in a cellular lysate or cell supernatant) in order to evaluate the abundance and pattern of expression of the 15986, 2188, 20743, 9148, 9151, 9791, 44252, 14184, 42461, 8204, 7970, 25552, 21657, 26492, 2411, 15088, 1905, 28899, 63380, 33935, 10480, 12686, 25501, 17694, 15701, 53062, 49908, 21612, 38949, 6216, 46863, 9235, 2201, 6985, 9883, 12238, 18057, 21617, 39228, 49928, 54476, 62113, 64316, 12264, 32362, 58198, 2887, 3205, 8557, 9600, 9693, 44867, 53058, 55556, 57658, 2208, 10252, 10302, 14218, 33877, 10317, 10485, 25964, 14815, 1363, 1397, 14827, 21708, 3801, 64698, 2179 or 13249 protein. Anti-15986, 2188, 20743, 9148, 9151, 9791, 44252, 14184, 42461, 8204, 7970, 25552, 21657, 26492, 2411, 15088, 1905, 28899, 63380, 33935, 10480, 12686, 25501, 17694, 15701, 53062, 49908, 21612, 38949, 6216, 46863, 9235, 2201, 6985, 9883, 12238, 18057, 21617, 39228, 49928, 54476, 62113, 64316, 12264, 32362, 58198, 2887, 3205, 8557, 9600, 9693, 44867, 53058, 55556, 57658, 2208, 10252, 10302, 14218, 33877, 10317, 10485, 25964, 14815, 1363, 1397, 14827, 21708, 3801, 64698, 2179 or 13249 antibodies can be used diagnostically to monitor protein levels in tissue as part of a clinical testing procedure, e.g., to, for example, determine the efficacy of a given treatment regimen. Detection can be facilitated by coupling (i.e., physically linking) the antibody to a detectable substance. Examples of detectable substances include various enzymes, prosthetic groups, fluorescent materials, luminescent materials, bioluminescent materials, and radioactive materials. Examples of suitable enzymes include horseradish peroxidase, alkaline phosphatase, β-galactosidase, or acetylcholinesterase; examples of suitable prosthetic group complexes include streptavidin/biotin and avidin/biotin; examples of suitable fluorescent materials include umbelliferone, fluorescein, fluorescein isothiocyanate, rhodamine, dichlorotriazinylamine fluorescein, dansyl chloride or phycoerythrin; an example of a luminescent material includes luminol; examples of bioluminescent materials include luciferase, luciferin, and aequorin, and examples of suitable radioactive material include ¹²⁵I, ¹³¹I, ³⁵S or ³H.

[1052] This invention is further illustrated by the following examples which should not be construed as limiting. The contents of all references, patents and published patent applications cited throughout this application, as well as the Figure and the Sequence Listing is incorporated herein by reference.

### EXAMPLES

### Example 1

### Tissue Distribution of Using Taqman™ Analysis

[1053] This example describes the TaqMan™ procedure. The Taqman™ procedure is a quantitative, reverse transcription PCR-based approach for detecting mRNA. The RT-PCR reaction exploits the 5′ nuclease activity of AmpliTaq Gold™ DNA Polymerase to cleave a TaqMan™ probe during PCR. Briefly, cDNA was generated from the samples of interest, e.g., heart, kidney, liver, skeletal muscle, and various vessels, and used as the starting material for PCR amplification. In addition to the 5′ and 3′ gene-specific primers, a gene-specific oligonucleotide probe (complementary to the region being amplified) was included in the reaction (i.e., the Taqman™ probe). The TaqMan™ probe includes the oligonucleotide with a fluorescent reporter dye covalently linked to the 5′ end of the probe (such as FAM (6-carboxyfluorescein), TET (6-carboxy-4,7,2′,7′-tetrachlorofluorescein), JOE (6-carboxy-4,5-dichloro-2,7-dimethoxyfluorescein), or VIC) and a quencher dye (TAMRA (6-carboxy-N,N,N′,N′-tetramethylrhodamine) at the 3′ end of the probe.

[1054] During the PCR reaction, cleavage of the probe separates the reporter dye and the quencher dye, resulting in increased fluorescence of the reporter. Accumulation of PCR products is detected directly by monitoring the increase in fluorescence of the reporter dye. When the probe is intact, the proximity of the reporter dye to the quencher dye results in suppression of the reporter fluorescence. During PCR, if the target of interest is present, the probe specifically anneals between the forward and reverse primer sites. The 5′-3′ nucleolytic activity of the AmpliTaq™ Gold DNA Polymerase cleaves the probe between the reporter and the quencher only if the probe hybridizes to the target. The probe fragments are then displaced from the target, and polymerization of the strand continues. The 3′ end of the probe is blocked to prevent extension of the probe during PCR. This process occurs in every cycle and does not interfere with the exponential accumulation of product. RNA was prepared using the trizol method and treated with DNase to remove contaminating genomic DNA. cDNA was synthesized using standard techniques. Mock cDNA synthesis in the absence of reverse transcriptase resulted in samples with no detectable PCR amplification of the control gene confirms efficient removal of genomic DNA contamination.

### Example 2

### Tissue Distribution of Using in Situ Analysis

[1055] For in situ analysis, various tissues, e.g., tissues obtained from normal colon, breast, lung, and ovarian normal tissue, as well as colon, breast, lung, and ovarian tumors, colon metastatic to the liver, and angiogenic tissues were first frozen on dry ice. Ten-micrometer-thick sections of the tissues were post-fixed with 4% formaldehyde in DEPC treated 1× phosphate-buffered saline at room temperature for 10 minutes before being rinsed twice in DEPC 1× phosphate-buffered saline and once in 0.1 M triethanolamine-HCl (pH 8.0). Following incubation in 0.25% acetic anhydride-0.1 M triethanolamine-HCl for 10 minutes, sections were rinsed in DEPC 2×SSC (1×SSC is 0.15M NaCl plus 0.015M sodium citrate). Tissue was then dehydrated through a series of ethanol washes, incubated in 100% chloroform for 5 minutes, and then rinsed in 100% ethanol for 1 minute and 95% ethanol for 1 minute and allowed to air dry.

[1056] Hybridizations were performed with ³⁵S-radiolabeled (5×10⁷ cpm/ml) cRNA probes. Probes were incubated in the presence of a solution containing 600 mM NaCl, 10 mM Tris (pH 7.5), 1 mM EDTA, 0.01% sheared salmon sperm DNA, 0.01% yeast tRNA, 0.05% yeast total RNA type X1, 1× Denhardt's solution, 50% formamide, 10% dextran sulfate, 100 mM dithiothreitol, 0.1% sodium dodecyl sulfate (SDS), and 0.1% sodium thiosulfate for 18 hours at 55° C.

[1057] After hybridization, slides were washed with 2×SSC. Sections were then sequentially incubated at 37° C. in TNE (a solution containing 10 mM Tris-HCl (pH 7.6), 500 mM NaCl, and 1 mM EDTA), for 10 minutes, in TNE with 10% g of RNase A per ml for 30 minutes, and finally in TNE for 10 minutes. Slides were then rinsed with 2×SSC at room temperature, washed with 2×SSC at 50° C. for 1 hour, washed with 0.2×SSC at 55° C. for 1 hour, and 0.2×SSC at 60° C. for 1 hour. Sections were then dehydrated rapidly through serial ethanol-0.3 M sodium acetate concentrations before being air dried and exposed to Kodak Biomax MR scientific imaging film for 24 hours and subsequently dipped in NB-2 photoemulsion and exposed at 4° C. for 7 days before being developed and counter stained.

### EQUIVALENTS

[1058] Those skilled in the art will recognize, or be able to ascertain using no more than routine experimentation, many equivalents to the specific embodiments of the invention described herein. Such equivalents are intended to be encompassed by the following claims.

What is claimed:

1. A method for identifying a compound capable of treating cancer or an angiogenic disorder, comprising:
a) combining a compound to be tested with a 15986, 2188, 20743, 9148, 9151, 9791, 44252, 14184, 42461, 8204, 7970, 25552, 21657, 26492, 2411, 15088, 1905, 28899, 63380, 33935, 10480, 12686, 25501, 17694, 15701, 53062, 49908, 21612, 38949, 6216, 46863, 9235, 2201, 6985, 9883, 12238, 18057, 21617, 39228, 49928, 54476, 62113, 64316, 12264, 32362, 58198, 2887, 3205, 8557, 9600, 9693, 44867, 53058, 55556, 57658, 2208, 10252, 10302, 14218, 33877, 10317, 10485, 25964, 14815, 1363, 1397, 14827, 21708, 3801, 64698, 2179 or 13249 polypeptide under conditions suitable for binding of the test compound to the polypeptide; and
b) detecting binding of the test compound to the polypeptide to thereby identify a compound which binds to the polypeptide, thereby identifying a compound capable of treating cancer or an angiogenic disorder.

2. The method of claim 1, wherein the compound is selected from the group consisting of a small molecule, a peptide or an antibody.

3. The method of claim 1, wherein the polypeptide further comprises heterologous sequences.

4. The method of claim 1, wherein the polypeptide is an isolated polypeptide, a membrane-bound form of an isolated polypeptide or a cell comprising the polypeptide.

5. The method of claim 4, wherein the cell is a cancer cell.

6. The method of claim 1, wherein the cancer or an angiogenic disorder is a cancer of the lung, colon, breast, ovary or prostate.

7. The method of claim 1, wherein the binding of the test compound to the polypeptide is detected by a method selected from the group consisting of:
a) a competition binding assay;
b) an immunoassay; and
c) a yeast two-hybrid assay.

8. A method for identifying a compound capable of treating cancer or an angiogenic disorder, comprising:
a) combining a compound to be tested with a host cell expressing a 15986, 2188, 20743, 9148, 9151, 9791, 44252, 14184, 42461, 8204, 7970, 25552, 21657, 26492, 2411, 15088, 1905, 28899, 63380, 33935, 10480, 12686, 25501, 17694, 15701, 53062, 49908, 21612, 38949, 6216, 46863, 9235, 2201, 6985, 9883, 12238, 18057, 21617, 39228, 49928, 54476, 62113, 64316, 12264, 32362, 58198, 2887, 3205, 8557, 9600, 9693, 44867, 53058, 55556, 57658, 2208, 10252, 10302, 14218, 33877, 10317, 10485, 25964, 14815, 1363, 1397, 14827, 21708, 3801, 64698, 2179 or 13249 polypeptide under conditions suitable for binding of the test compound to the polypeptide; and
b) detecting binding of the test compound to the polypeptide to thereby identify a compound which binds to the polypeptide, thereby identifying a compound capable of treating cancer or an angiogenic disorder.

9. The method of claim 8, wherein the compound is selected for the group consisting of a small molecule, a peptide, an antibody or an antisense nucleic acid molecule.

10. The method of claim 8, wherein the polypeptide further comprises heterologous sequences.

11. The method of claim 8, wherein the host cell is a cancer cell.

12. The method of claim 8, wherein the cancer or an angiogenic disorder is a cancer of the lung, colon, breast, ovary or prostate.

13. The method of claim 8, wherein the binding of the test compound to the polypeptide is detected by a method selected from the group consisting of:
a) a competition binding assay;
b) an immunoassay; and
c) a yeast two-hybrid assay.

14. A method of identifying a subject having a cancer, or at risk for developing a cancer comprising:
a) contacting a sample obtained from the subject comprising polypeptides with a 15986, 2188, 20743, 9148, 9151, 9791, 44252, 14184, 42461, 8204, 7970, 25552, 21657, 26492, 2411, 15088, 1905, 28899, 63380, 33935, 10480, 12686, 25501, 17694, 15701, 53062, 49908, 21612, 38949, 6216, 46863, 9235, 2201, 6985, 9883, 12238, 18057, 21617, 39228, 49928, 54476, 62113, 64316, 12264, 32362, 58198, 2887, 3205, 8557, 9600, 9693, 44867, 53058, 55556, 57658, 2208, 10252, 10302, 14218, 33877, 10317, 10485, 25964, 14815, 1363, 1397, 14827, 21708, 3801, 64698, 2179 or 13249 binding substance; and
b) detecting the presence of a polypeptide in the sample that binds to the 15986, 2188, 20743, 9148, 9151, 9791, 44252, 14184, 42461, 8204, 7970, 25552, 21657, 26492, 2411, 15088, 1905, 28899, 63380, 33935, 10480, 12686, 25501, 17694, 15701, 53062, 49908, 21612, 38949, 6216, 46863, 9235, 2201, 6985, 9883, 12238, 18057, 21617, 39228, 49928, 54476, 62113, 64316, 12264, 32362, 58198, 2887, 3205, 8557, 9600, 9693, 44867, 53058, 55556, 57658, 2208, 10252, 10302, 14218, 33877, 10317, 10485, 25964, 14815, 1363, 1397, 14827, 21708, 3801, 64698, 2179 or 13249 binding substance, thereby identifying a subject having a cancer, or at risk for developing a cancer.

15. The method of claim 14, wherein the binding substance is an antibody.

16. The method of claim 14, wherein the binding substance is detectably labeled.

17. A method for treating a subject having a cancer or a cancer characterized by aberrant 15986, 2188, 20743, 9148, 9151, 9791, 44252, 14184, 42461, 8204, 7970, 25552, 21657, 26492, 2411, 15088, 1905, 28899, 63380, 33935, 10480, 12686, 25501, 17694, 15701, 53062, 49908, 21612, 38949, 6216, 46863, 9235, 2201, 6985, 9883, 12238, 18057, 21617, 39228, 49928, 54476, 62113, 64316, 12264, 32362, 58198, 2887, 3205, 8557, 9600, 9693, 44867, 53058, 55556, 57658, 2208, 10252, 10302, 14218, 33877, 10317, 10485, 25964, 14815, 1363, 1397, 14827, 21708, 3801, 64698, 2179 or 13249 polypeptide activity or aberrant 15986, 2188, 20743, 9148, 9151, 9791, 44252, 14184, 42461, 8204, 7970, 25552, 21657, 26492, 2411, 15088, 1905, 28899, 63380, 33935, 10480, 12686, 25501, 17694, 15701, 53062, 49908, 21612, 38949, 6216, 46863, 9235, 2201, 6985, 9883, 12238, 18057, 21617, 39228, 49928, 54476, 62113, 64316, 12264, 32362, 58198, 2887, 3205, 8557, 9600, 9693, 44867, 53058, 55556, 57658, 2208, 10252, 10302, 14218, 33877, 10317, 10485, 25964, 14815, 1363, 1397, 14827, 21708, 3801, 64698, 2179 or 13249 nucleic acid expression comprising administering to the subject a 15986, 2188, 20743, 9148, 9151, 9791, 44252, 14184, 42461, 8204, 7970, 25552, 21657, 26492, 2411, 15088, 1905, 28899, 63380, 33935, 10480, 12686, 25501, 17694, 15701, 53062, 49908, 21612, 38949, 6216, 46863, 9235, 2201, 6985, 9883, 12238, 18057, 21617, 39228, 49928, 54476, 62113, 64316, 12264, 32362, 58198, 2887, 3205, 8557, 9600, 9693, 44867, 53058, 55556, 57658, 2208, 10252, 10302, 14218, 33877, 10317, 10485, 25964, 14815, 1363, 1397, 14827, 21708, 3801, 64698, 2179 or 13249 modulator, thereby treating said subject having a cancer.

18. The method of claim 17, wherein the disorder is a disorder associated with a cancer including but not limited to cancers of the lung, colon, breast, ovary or prostate or an angiogenic disorder.

19. The method of claim 17, wherein the 15986, 2188, 20743, 9148, 9151, 9791, 44252, 14184, 42461, 8204, 7970, 25552, 21657, 26492, 2411, 15088, 1905, 28899, 63380, 33935, 10480, 12686, 25501, 17694, 15701, 53062, 49908, 21612, 38949, 6216, 46863, 9235, 2201, 6985, 9883, 12238, 18057, 21617, 39228, 49928, 54476, 62113, 64316, 12264, 32362, 58198, 2887, 3205, 8557, 9600, 9693, 44867, 53058, 55556, 57658, 2208, 10252, 10302, 14218, 33877, 10317, 10485, 25964, 14815, 1363, 1397, 14827, 21708, 3801, 64698, 2179 or 13249 modulator is administered in a pharmaceutically acceptable formulation.

20. The method of 17, wherein the 15986, 2188, 20743, 9148, 9151, 9791, 44252, 14184, 42461, 8204, 7970, 25552, 21657, 26492, 2411, 15088, 1905, 28899, 63380, 33935, 10480, 12686, 25501, 17694, 15701, 53062, 49908, 21612, 38949, 6216, 46863, 9235, 2201, 6985, 9883, 12238, 18057, 21617, 39228, 49928, 54476, 62113, 64316, 12264, 32362, 58198, 2887, 3205, 8557, 9600, 9693, 44867, 53058, 55556, 57658, 2208, 10252, 10302, 14218, 33877, 10317, 10485, 25964, 14815, 1363, 1397, 14827, 21708, 3801, 64698, 2179 or 13249 modulator is capable of modulating 15986, 2188, 20743, 9148, 9151, 9791, 44252, 14184, 42461, 8204, 7970, 25552, 21657, 26492, 2411, 15088, 1905, 28899, 63380, 33935, 10480, 12686, 25501, 17694, 15701, 53062, 49908, 21612, 38949, 6216, 46863, 9235, 2201, 6985, 9883, 12238, 18057, 21617, 39228, 49928, 54476, 62113, 64316, 12264, 32362, 58198, 2887, 3205, 8557, 9600, 9693, 44867, 53058, 55556, 57658, 2208, 10252, 10302, 14218, 33877, 10317, 10485, 25964, 14815, 1363, 1397, 14827, 21708, 3801, 64698, 2179 or 13249 polypeptide activity.

21. The method of claim 20, wherein the 15986, 2188, 20743, 9148, 9151, 9791, 44252, 14184, 42461, 8204, 7970, 25552, 21657, 26492, 2411, 15088, 1905, 28899, 63380, 33935, 10480, 12686, 25501, 17694, 15701, 53062, 49908, 21612, 38949, 6216, 46863, 9235, 2201, 6985, 9883, 12238, 18057, 21617, 39228, 49928, 54476, 62113, 64316, 12264, 32362, 58198, 2887, 3205, 8557, 9600, 9693, 44867, 53058, 55556, 57658, 2208, 10252, 10302, 14218, 33877, 10317, 10485, 25964, 14815, 1363, 1397, 14827, 21708, 3801, 64698, 2179 or 13249 modulator is an anti-15986, 2188, 20743, 9148, 9151, 9791, 44252, 14184, 42461, 8204, 7970, 25552, 21657, 26492, 2411, 15088, 1905, 28899, 63380, 33935, 10480, 12686, 25501, 17694, 15701, 53062, 49908, 21612, 38949, 6216, 46863, 9235, 2201, 6985, 9883, 12238, 18057, 21617, 39228, 49928, 54476, 62113, 64316, 12264, 32362, 58198, 2887, 3205, 8557, 9600, 9693, 44867, 53058, 55556, 57658, 2208, 10252, 10302, 14218, 33877, 10317, 10485, 25964, 14815, 1363, 1397, 14827, 21708, 3801, 64698, 2179 or 13249 antibody.

22. The method of claim 17, wherein the 15986, 2188, 20743, 9148, 9151, 9791, 44252, 14184, 42461, 8204, 7970, 25552, 21657, 26492, 2411, 15088, 1905, 28899, 63380, 33935, 10480, 12686, 25501, 17694, 15701, 53062, 49908, 21612, 38949, 6216, 46863, 9235, 2201, 6985, 9883, 12238, 18057, 21617, 39228, 49928, 54476, 62113, 64316, 12264, 32362, 58198, 2887, 3205, 8557, 9600, 9693, 44867, 53058, 55556, 57658, 2208, 10252, 10302, 14218, 33877, 10317, 10485, 25964, 14815, 1363, 1397, 14827, 21708, 3801, 64698, 2179 or 13249 modulator is capable of modulating 15986, 2188, 20743, 9148, 9151, 9791, 44252, 14184, 42461, 8204, 7970, 25552, 21657, 26492, 2411, 15088, 1905, 28899, 63380, 33935, 10480, 12686, 25501, 17694, 15701, 53062, 49908, 21612, 38949, 6216, 46863, 9235, 2201, 6985, 9883, 12238, 18057, 21617, 39228, 49928, 54476, 62113, 64316, 12264, 32362, 58198, 2887, 3205, 8557, 9600, 9693, 44867, 53058, 55556, 57658, 2208, 10252, 10302, 14218, 33877, 10317, 10485, 25964, 14815, 1363, 1397, 14827, 21708, 3801, 64698, 2179 or 13249 nucleic acid expression.

The application's sequence listing, which the Patent Office published only in electronic form, follows.

SEQUENCE LISTING (144 sequences)

SEQ ID NO: 1 - DNA, 1579 bp, Homo Sapiens
  CDS (88)...(1161)
tcccgccgcctctgcgcccgcgccgcgcccccggcgccccctccccagcgcgcccccggccgctcctccgcgccgcgctcgtcggccatggcccgggagaacggcgagagcagctcctcctggaaaaagcaagctgaagacatcaagaagatcttcgagttcaaagagaccctcggaaccggggccttttccgaagtggttttagctgaagagaaggcaactggcaagctctttgctgtgaagtgtatccctaagaaggcgctgaagggcaaggaaagcagcatagagaatgagatagccgtcctgagaaagattaagcatgaaaatattgttgccctggaagacatttatgaaagcccaaatcacctgtacttggtcatgcagctggtgtccggtggagagctgtttgaccggatagtggagaaggggttttatacagagaaggatgccagcactctgatccgccaagtcttggacgccgtgtactatctccacagaatgggcatcgtccacagagacctcaagcccgaaaatctcttgtactacagtcaagatgaggagtccaaaataatgatcagtgactttggattgtcaaaaatggagggcaaaggagatgtgatgtccactgcctgtggaactccaggctatgtcgctcctgaagtcctcgcccagaaaccttacagcaaagccgttgactgctggtccatcggagtgattgcctacatcttgctctgcggctaccctcctttttatgatgaaaatgactccaagctctttgagcagatcctcaaggcggaatatgagtttgactctccctactgggatgacatctccgactctgcaaaagacttcattcggaacctgatggagaaggacccgaataaaagatacacgtgtgagcaggcagctcggcacccatggatcgctggtgacacagccctcaacaaaaacatccacgagtccgtcagcgcccagatccggaaaaactttgccaagagcaaatggagacaagcatttaatgccacggccgtcgtgagacatatgagaaaactacacctcggcagcagcctggacagttcaaatgcaagtgtttcgagcagcctcagtttggccagccaaaaagactgtgcgtatgtagcaaaaccagaatccctcagctgacactgaagacgagcctggggtggagaggagggagccggcatctgccgagcacctcctgtttgccaggcgctttctatacttaatcccatgtcatgcgaccctaggactttttttaacatgtaatcactgggctgggtgcagtggctcacgcctgtaatcccaacactttgggaggctgaggcaggaggactgtttgagttcaggagttttaagaccagcctgaccaacatggtgaaaccccatctctactaaaatataaaaattagccgggtgtggtggcgagcacctgtaatgtcagctacttgggaggctgaggcaggagaatcacttgaacccaggaagcggaggttgcaatcagctgagatcacaccactgcactccagcctgggtgacagattgagactccctctcaaaaaaa

SEQ ID NO: 2 - protein, 357 aa, Homo Sapiens
MARENGESSSSWKKQAEDIKKIFEFKETLGTGAFSEVVLAEEKATGKLFAVKCIPKKALKGKESSIENEIAVLRKIKHENIVALEDIYESPNHLYLVMQLVSGGELFDRIVEKGFYTEKDASTLIRQVLDAVYYLHRMGIVHRDLKPENLLYYSQDEESKIMISDFGLSKMEGKGDVMSTACGTPGYVAPEVLAQKPYSKAVDCWSIGVIAYILLCGYPPFYDENDSKLFEQILKAEYEFDSPYWDDISDSAKDFIRNLMEKDPNKRYTCEQAARHPWIAGDTALNKNIHESVSAQIRKNFAKSKWRQAFNATAVVRHMRKLHLGSSLDSSNASVSSSLSLASQKDCAYVAKPESLS

SEQ ID NO: 3 - DNA, 2391 bp, Homo Sapiens
  CDS (22)...(1512)
ggtgtgctcttgagggattaaatgcaaagagatcacaccatggactacaaggaaagctgcccaagtgtaagcattcccagctccgatgaacacagagagaaaaagaagaggtttactgtttataaagttctggtttcagtgggaagaagtgaatggtttgtcttcaggagatatgcagagtttgataaactttataacactttaaaaaaacagtttcctgctatggccctgaagattcctgccaagagaatatttggtgataattttgatccagattttattaaacaaagacgagcaggactaaacgaattcattcagaacctagttaggtatccagaactttataaccatccagatgtcagagcattccttcaaatggacagtccaaaacaccagtcagatccatctgaagatgaggatgaaagaagttctcagaagctacactctacctcacagaacatcaacctgggaccgtctggaaatcctcatgccaaaccaactgactttgatttcttaaaagttattggaaaaggcagctttggcaaggttcttcttgcaaaacggaaactggatggaaaattttatgctgtcaaagtgttacagaaaaaaatagttctcaacagaaaagagcaaaaacatattatggctgaacgtaatgtgctcttgaaaaatgtgaaacatccgtttttggttggattgcattattccttccaaacaactgaaaagctttattttgttctggattttgttaatggaggggagctttttttccacttacaaagagaacggtcctttcctgagcacagagctaggttttacgctgctgaaattgctagtgcattgggttacttacattccatcaaaatagtatacagagacttgaaaccagaaaatattcttttggattcagtaggacatgttgtcttaacagattttgggctttgtaaagaaggaattgctatttctgacaccactaccacattttgtgggacaccagagtatcttgcacctgaagtaattagaaaacagccctatgacaatactgtagattggtggtgccttggggctgttctgtatgaaatgctgtatggattgcctcctttttattgccgagatgttgctgaaatgtatgacaatatccttcacaaacccctaagtttgaggccaggagtgagtcttacagcctggtccattctggaagaactcctagaaaaagacaggcaaaatcgacttggtgccaaggaagactttcttgaaattcagaatcatcctttttttgaatcactcagctgggctgaccttgtacaaaagaagattccaccaccatttaatcctaatgtggctggaccagatgatatcagaaactttgacacagcatttacagaagaaacagttccatattctgtgtgtgtatcttctgactattctatagtgaatgccagtgtattggaggcagatgatgcattcgttggtttctcttatgcacctccttcagaagacttatttttgtgagcagtttgccattcagaaaccattgagcaaaataagtctatagatgggactgaaacttctatttgtgtgaatatattcaaatatgtataactagtgcctcatttttatatgtaatgatgaaaactatgaaaaaatgtattttcttctatgtgcaagaaaaatagggcatttcaaagagctgttttgattaaaatttatattcttgtttaataagcttatttttaaacaatttaaaagctattattcttagcattaacctatttttaaagaaaccttttttgctattgactgttttttccctctaagtttacactaacatctacccaagatagactgttttttaacagtcaatttcagttcagctaacatatattaatacctttgtaactctttgctatggcttttgttatcacaccaaaactatgcaattggtacatggttgtttaagaagaaaccgtatttttccatgataaatcactgtttgaaatatttggttcatggtatgatcgaaatgtaaaagcataattaacacattggctgctagttaacaattggaataactttattctgcagatcatttaagaagtaacaggccgggcgcggtggctcacgcctgtaatcccagcactttgggaggctgaggcgggcagatcacctgaggtcaggagttggagaccagcctgaccaacatggacaaaccccgtctctactaaaaatacaaaattggcagggtgtggtggcacatgcctataatcccagctacttgggaggctaaggcaggagaatcgcttgaacccgggaggcggaggttgcagtgagccgagatcgcaccattgcactcctgcctgggcaacaagagtgaaactccatctccaaaaa

SEQ ID NO: 4 - protein, 496 aa, Homo Sapiens
MQRDHTMDYKESCPSVSIPSSDEHREKKKRFTVYKVLVSVGRSEWFVFRRYAEFDKLYNTLKKQFPAMALKIPAKRIFGDNFDPDFIKQRRAGLNEFIQNLVRYPELYNHPDVRAFLQMDSPKHQSDPSEDEDERSSQKLHSTSQNINLGPSGNPHAKPTDFDFLKVIGKGSFGKVLLAKRKLDGKFYAVKVLQKKIVLNRKEQKHIMAERNVLLKNVKHPFLVGLHYSFQTTEKLYFVLDFVNGGELFFHLQRERSFPEHRARFYAAEIASALGYLHSIKIVYRDLKPENILLDSVGHVVLTDFGLCKEGIAISDTTTTFCGTPEYLAPEVIRKQPYDNTVDWWCLGAVLYEMLYGLPPFYCRDVAEMYDNILHKPLSLRPGVSLTAWSILEELLEKDRQNRLGAKEDFLEIQNHPFFESLSWADLVQKKIPPPFNPNVAGPDDIRNFDTAFTEETVPYSVCVSSDYSIVNASVLEADDAFVGFSYAPPSEDLFL

SEQ ID NO: 5 - DNA, 3131 bp, Homo Sapiens
  CDS (66)...(2384)
ggagccgccatgtaaccggcgccgcccggagcccgagccgcgcgggccccagcgacccgcccgccatgggggacgaggacgacgatgagagctgcgccgtggagctgcggatcacagaagccaacctgaccgggcacgaggagaaggtgagcgtggagaacttcgagctgctcaaggtgctgggcacgggagcctacggcaaggtgttcctggtgcggaaggcgggcgggcacgacgcggggaagctgtacgccatgaaggtgctgcgcaaggcggcgctggtgcagcgcgccaagacgcaggagcacacgcgcaccgagcgctcggtgctggagctggtgcgccaggcgcccttcctggtcacgctgcactacgctttccagacggatgccaagctgcacctcatcctggactatgtgagcggcggggagatgttcacccacctctaccagcgccagtacttcaaggaggctgaggtgcgcgtgtatgggggtgagatcgtgctggccctggaacacctgcacaagctcggcatcatttaccgagacctgaaactggagaatgtgctgctggactccgagggccacattgtcctcacggacttcgggctgagcaaggagttcctgacggaggagaaagagcggaccttctccttctgtggcaccatcgagtacatggcccccgaaatcatccgtagcaagacggggcatggcaaggctgtggactggtggagcctgggcatcttgctcttcgagctgctgacgggggcctcgcccttcaccctggagggcgagaggaacacgcaggctgaggtgtctcgacggatcctgaagtgctcccctcccttcccccctcggatcgggcccgtggcgcaggacctgctgcagcggctgctttgtaaggatcctaagaagcgattgggcgcggggccccagggggcacaagaagtccggaaccatcccttcttccagggcctcgattgggtggctctggctgccaggaagattccagccccattccggccccaaatccgctcagagctggatgtgggcaactttgcggaggaattcactcggctggagcctgtctactcaccccctggcagccccccacctggggacccccgaatctttcagggatactcctttgtggcaccctccattctctttgaccacaacaacgcggtgatgaccgatgggctggaagcgcctggtgctggagaccggccaggtcgggcagcggtggccaggagcgctatgatgcaggactcgcccttcttccagcagtacgagctggacctgcgggagcctgcgctgggccagggcagcttttctgtgtgtcgccgctgccgccagcgccagagcggccaggagttcgcagtcaagatcctcagtcgcaggctggaggcgaacacgcagcgcgaagtggctgccctgcgcctgtgccagtcacaccccaacgtggtgaatctgcacgaggtgcatcacgaccagctgcacacgtacctggtcctggagctgctgcggggcggggagctgctggagcacatccgcaagaagcggcacttcagcgagtcggaagcaagccagatcctgcgcagcctcgtgtcggccgtgagcttcatgcacgaggaggcgggcgtggtgcaccgcgacctcaagccggagaacatcctgtacgccgacgacacgcccggggccccggtgaaaatcatcgacttcgggttcgcgcggttgcggccgcagagtcccggggtgcccatgcagacgccctgcttcacgctgcagtacgctgcccccgagctgctggcgcagcagggctacgacgagtcctgcgacctctggagcctgggcgtcattctgtacatgatgctgtcggggcaggtccccttccagggggcctctggccagggcgggcagagccaggcggccgagatcatgtgcaaaatccgcgaggggcgcttctcccttgacggggaggcctggcagggtgtatccgaggaagccaaggagctggtccgagggctcctgaccgtggaccccgccaagcggctgaagctcgagggactgcggggcagctcgtggctgcaggacggcagcgcgcgctcctcgcccccgctccggacgcccgacgtgctcgagtcctctgggcccgcagtgcgctcgggtctcaacgccaccttcatggcattcaaccggggcaagcgggagggcttcttcctgaagagcgtggagaatgcacccctggccaagcggcggaagcagaagctgcggagcgccaccgcctcccgccggggctcccctgcaccagccaacccgggccgagcccccgtcgcctccaaaggggccccccgccgagccaacggccccctgcccccctcctaatccccaccactgtgacccccttccctcataggggctgtgacctgggagcccggctcactcccggaggcctctgcctgcggctgacctgatccccaagggactgtcctttcctctcctaccccaccccactcccagacagagcagaagtatttttataagcagagaattttttatgtcttaccagatagagttgcagggaagggggggcctgctggggagtggggtttggggggccctctcccaggacactgcctcttctgggcagaaggcccctccagggggactgctccaacaggaaagagcccctcccccacttctaagcactgagttaggagtgctaactcctaaactgggaccccctaccctgttctcccctgaggccccgttcctgggaggggcacccctcaactgtcactttatggactgtctgtgcaattacgtccaccaaagacccgtgttgggggtactgaaggagaggccctgggggaccctctgaagcatttctgcctcactttatgtcatctgcttctcccctgttggggctaaggaaggagataggtggctcctaaaagaggaggccatcttctcacccaccccttcctctttggcacagctactcctggctgggggtggggccttgggggtctgggctgggcatccatggtcactgcctcagcccagccaggctgtgcctttgactttaaaataaaagtccacccagtgctgtgtgtggcaaaaaaaaaaaaa

SEQ ID NO: 6 - protein, 772 aa, Homo Sapiens
MGDEDDDESCAVELRITEANLTGHEEKVSVENFELLKVLGTGAYGKVFLVRKAGGHDAGKLYAMKVLRKAALVQRAKTQEHTRTERSVLELVRQAPFLVTLHYAFQTDAKLHLILDYVSGGEMFTHLYQRQYFKEAEVRVYGGEIVLALEHLHKLGIIYRDLKLENVLLDSEGHIVLTDFGLSKEFLTEEKERTFSFCGTIEYMAPEIIRSKTGHGKAVDWWSLGILLFELLTGASPFTLEGERNTQAEVSRRILKCSPPFPPRIGPVAQDLLQRLLCKDPKKRLGAGPQGAQEVRNHPFFQGLDWVALAARKIPAPFRPQIRSELDVGNFAEEFTRLEPVYSPPGSPPPGDPRIFQGYSFVAPSILFDHNNAVMTDGLEAPGAGDRPGRAAVARSAMMQDSPFFQQYELDLREPALGQGSFSVCRRCRQRQSGQEFAVKILSRRLEANTQREVAALRLCQSHPNVVNLHEVHHDQLHTYLVLELLRGGELLEHIRKKRHFSESEASQILRSLVSAVSFMHEEAGVVHRDLKPENILYADDTPGAPVKIIDFGFARLRPQSPGVPMQTPCFTLQYAAPELLAQQGYDESCDLWSLGVILYMMLSGQVPFQGASGQGGQSQAAEIMCKIREGRFSLDGEAWQGVSEEAKELVRGLLTVDPAKRLKLEGLRGSSWLQDGSARSSPPLRTPDVLESSGPAVRSGLNATFMAFNRGKREGFFLKSVENAPLAKRRKQKLRSATASRRGSPAPANPGRAPVASKGAPRRANGPLPPS

SEQ ID NO: 7 - DNA, 2447 bp, Homo Sapiens
  CDS (51)...(875)
cccggcaaccacgagcccagccaatcagcgccccggactgcaccagagccatggtcggcagaagagcactgatcgtactggctcactcagagaggacctccttcaactatgccatgaaggaggctgctgcagcggctttgaagaagaaaggatgggaggtggtggagtcggacctctatgccatgaacttcaatcccatcatttccagaaaggacatcacaggtaaactgaaggaccctgcgaactttcagtatcctgccgagtctgttctggcttataaagaaggccatctgagcccagatattgtggctgaacaaaagaagctggaagccgcagaccttgtgatattccagttccccctgcagtggtttggagtccctgccattctgaaaggctggtttgagcgagtgttcataggagagtttgcttacacttacgctgccatgtatgacaaaggacccttccggagtaagaaggcagtgctttccatcaccactggtggcagtggctccatgtactctctgcaagggatccacggggacatgaatgtcattctctggccaattcagagtggcattctgcatttctgtggcttccaagtcttagaacctcaactgacatatagcattgggcacactccagcagacgcccgaattcaaatcctggaaggatggaagaaacgcctggagaatatttgggatgagacaccactgtattttgctccaagcagcctctttgacctaaacttccaggcaggattcttaatgaaaaaagaggtacaggatgaggagaaaaacaagaaatttggcctttctgtgggccatcacttgggcaagtccatcccaactgacaaccagatcaaagctagaaaatgagattccttagcctggatttccttctaacatgttatcaaatctgggtatctttccaggcttccctgacttgctttagtttttaagatttgtgtttttctttttccacaaggaataaatgagagggaatcgaccgtattcgtgcatttttggatgcatttttaactgattcttatgattactatcatggcatataaccaaaatccgactgggctcaagaggccacttagggaaagatgtagaaagatgctagaaaaatgttctttaaaggcatctacacaatttaattcctctttttagggtcaaagtttagggtacagttggctaggtatcattcaactctccaatgttctattaatcacctctctgtagtttatggtcagaagggaattgctcagagaaggtaaaagactgaatctacctgcctaagggacttaacttgtttggtagttagccatctaatgcttgtttatgatatttcttgctttcaattacaaagcagttactaatatgcctagcacaagtaccactcttggtcagcttttgttgtttatatacagtacacagataccttgaaaggaagagctaataaatctcttctttgctgcagtcatctactttttttttaattaaaaaaaattttttttgaagcagtcttgctctgttacccaggctggagtgcagtggtgtgatctcggctcactgcaacctctgcctcccaggttccagcaattctcctgcctcagcctccctagtagctgggatgacaggcgcctgccatcatgcctgactaatttttgtatttttagtagagacggcgtttcaccatgttggccaggctggtctcaaactcctgacctcaggtgatccgcctacctcagcctcccaaagtgctgggattacaggcgtgatccaccacacctggcccttgcaatcttctactttaaggtttgcagagataaaccaataaatccacaccgtacatctgcaatatgaattccaagaaaggaaatagtaccttcaatacttaaaaatagtcttccacaaaaaatactttatttctgatctatacaaattttcagaaggttattttctttatcattgctaaactgatgacttaccatgggatggggtccagtcccatgaccttggggtacaattgtaaacctagagttttatcaactttggtgaacagttttggcataatagtcaatttctacttctggaagtcatctcattccactgttggtattatataattcaaggagaatatgataaaacactgccctcttgtggtgcattgaaagaagagatgagaaatgatgaaaaggttgcctgaaaaatgggagacagcctcttacttgccaagaaaatgaagggattggaccgagctggaaaacctcctttaccagatgctgactggcactggtggtttttgctctcgacatatccacaatagctgacggctgggtgtttcagtttgcaaaatattttgttgccttcatcttcactgcaattttgtgtaaatttctcaaagatctaattaaataaataaaattcatttctacagactca

SEQ ID NO: 8 - protein, 274 aa, Homo Sapiens
MVGRRALIVLAHSERTSFNYAMKEAAAAALKKKGWEVVESDLYAMNFNPIISRKDITGKLKDPANFQYPAESVLAYKEGHLSPDIVAEQKKLEAADLVIFQFPLQWFGVPAILKGWFERVFIGEFAYTYAAMYDKGPFRSKKAVLSITTGGSGSMYSLQGIHGDMNVILWPIQSGILHFCGFQVLEPQLTYSIGHTPADARIQILEGWKKRLENIWDETPLYFAPSSLFDLNFQAGFLMKKEVQDEEKNKKFGLSVGHHLGKSIPTDNQIKARK

SEQ ID NO: 9 - DNA, 1808 bp, Homo Sapiens
  CDS (142)...(1215)
gcctagtcccgcccctgcgtgcggcgcttctcccaggccccaccttccatccagtgccctggaccctcggctgggtagcgccaccagagcgaccaaacgtcccgcgccttccaggccgcactccagagccaaaagagctccatggcggcggcggccaagcccaacaacctttccctggtggtgcacggaccgggggacttgcgcctggagaactatcctatccctgaaccaggcccaaatgaggtcttgctgaggatgcattctgttggaatctgtggctcagatgtccactactgggagtatggtcgaattgggaattttattgtgaaaaagcccatggtgctgggacatgaagcttcgggaacagtcgaaaaagtgggatcatcggtaaagcacctaaaaccaggtgatcgtgttgccatcgagcctggtgctccccgagaaaatgatgaattctgcaagatgggccgatacaatctgtcaccttccatcttcttctgtgccacgccccccgatgacgggaacctctgccggttctataagcacaatgcagccttttgttacaagcttcctgacaatgtcacctttgaggaaggcgccctgatcgagccactttctgtggggatccatgcctgcaggagaggcggagttaccctgggacacaaggtccttgtgtgtggagctgggccaatcgggatggtcactttgctcgtggccaaagcaatgggagcagctcaagtagtggtgactgatctgtctgctacccgattgtccaaagccaaggagattggggctgatttagtcctccagatctccaaggagagccctcaggaaatcgccaggaaagtagaaggtcagctggggtgcaagccggaagtcaccatcgagtgcacgggggcagaggcctccatccaggcgggcatctacgccactcgctctggtgggaccctcgtgcttgtggggctgggctctgagatgaccaccgtacccctactgcatgcagccatccgggaggtggatatcaagggcgtgtttcgatactgcaacacgtggccagtggcgatttcgatgcttgcgtccaagtctgtgaatgtaaaacccctcgtcacccataggtttcctctggagaaagctctggaggcctttgaaacatttaaaaagggattggggttgaaaatcatgctcaagtgtgaccccagtgaccagaatccctgatgttaatgggctctgctcatccccacagtcttgggatctcagggcacaatggctggacatgggtgggctctgatgcagaactttctcttttgaatgttaagaataactaatacaattcattgtgaacagaagtccttaagcagaggaattggtgtgccttaaagatacaatctgggatagtttgggggaacttgtagccagaatgccctgttcatgctgagcaaagttcagcaagtagagcagagtttggcaggcaggtgccaggaactccccttcttcctggagtgccttcattgaggaaggaaatctggcccttgggtttcctggttccactgctactgacccagaggggaatgagggctgagttatgaaaagataacttcatgaagacttaactggcccagaagctgattttcatgaaaatctgccactcagggtctgggatgaaggcttgtcagcacttccagtttagaacgcaatgtttctagagacatattggctgtttgttttgatgataaaaggagaataagaaaaggcatcactttcctggatccaggataatttttaaaccaatcaaatgaaaaaaacaaaca

SEQ ID NO: 10 - protein, 357 aa, Homo Sapiens
MAAAAKPNNLSLVVHGPGDLRLENYPIPEPGPNEVLLRMHSVGICGSDVHYWEYGRIGNFIVKKPMVLGHEASGTVEKVGSSVKHLKPGDRVAIEPGAPRENDEFCKMGRYNLSPSIFFCATPPDDGNLCRFYKHNAAFCYKLPDNVTFEEGALIEPLSVGIHACRRGGVTLGHKVLVCGAGPIGMVTLLVAKAMGAAQVVVTDLSATRLSKAKEIGADLVLQISKESPQEIARKVEGQLGCKPEVTIECTGAEASIQAGIYATRSGGTLVLVGLGSEMTTVPLLHAAIREVDIKGVFRYCNTWPVAISMLASKSVNVKPLVTHRFPLEKALEAFETFKKGLGLKIMLKCDPSDQNP

SEQ ID NO: 11 - DNA, 1286 bp, Homo Sapiens
  CDS (46)...(1149)
cgaccggaccgggctcgggggagcgtgagttgcagttaaaagaagatggatgcacagtgttcagccaaggtcaatgcaaggaagaggagaaaagaggcgcccggacccaacggggcaacagaagaagatggggttccttccaaagtgcagcgctgtgcagtgggcttacggcaaccagctcctttttctgatgaaattgaagttgactttagtaagccctatgtcagggtaactatggaagaagccagcagaggaactccttgtgagcgacctgtgagagtttatgccgatggaatatttgacttatttcactctggtcacgcccgagctctgatgcaagcgaagaaccttttccctaatacgtacctcattgtgggagtttgcagtgatgagctcacacacaacttcaaaggcttcacggtgatgaacgagaatgagcgctatgacgcagtccagcactgccgctacgtggatgaggtggtgaggaatgcgccctggacgctgacacccgagttcctggccgaacaccggattgattttgtagcccatgatgatattccttattcatctgctggcagtgatgatgtttataagcacatcaaggaggcaggcatgtttgctccaacacagaggacagaaggtatctccacatcagacatcatcacccgaattgtgcgggattatgatgtgtatgcgaggcggaacctgcagaggggctacacagcaaaggagctcaatgtcagctttatcaacgagaagaaataccacttgcaggagagggttgacaaagtaaaggagaaagtgaaagatgtggaggaaaagtcaaaagaatttgttcagaaggtggaggaaaaaagcattgacctcattcagaagtgggaggagaagtcccgagaattcattggaagttttctggaaatgtttggtccggaaggagcactgaaacatatgctgaaagaggggaagggccggatgctgcaggccatcagcccgaagcagagccccagcagcagccctactcgcgagcgctccccctccccctctttccgatggcccttctccggcaagacttccccaccttgctccccagcaaatctctccaggcacaaggctgcagcctatgatatcagtgaggatgaagaagactaatgtttcctccctcctttcctgtcctccctttctgtcccattaccttcagaagctctctgttgaattccgaattgtgaccccaacactaaacctaaggacagctacaaaggaaagacaactggggaaagaagacctag

SEQ ID NO: 12 - protein, 367 aa, Homo Sapiens
MDAQCSAKVNARKRRKEAPGPNGATEEDGVPSKVQRCAVGLRQPAPFSDEIEVDFSKPYVRVTMEEASRGTPCERPVRVYADGIFDLFHSGHARALMQAKNLFPNTYLIVGVCSDELTHNFKGFTVMNENERYDAVQHCRYVDEVVRNAPWTLTPEFLAEHRIDFVAHDDIPYSSAGSDDVYKHIKEAGMFAPTQRTEGISTSDIITRIVRDYDVYARRNLQRGYTAKELNVSFINEKKYHLQERVDKVKEKVKDVEEKSKEFVQKVEEKSIDLIQKWEEKSREFIGSFLEMFGPEGALKHMLKEGKGRMLQAISPKQSPSSSPTRERSPSPSFRWPFSGKTSPPCSPANLSRHKAAAYDISEDEED

SEQ ID NO: 13 - DNA, 2972 bp, Homo Sapiens
  CDS (28)...(2700)
tcttcggacctaggctgccctgccgtcatgtcgcaagggatcctttctccgccagcgggcttgctgtccgatgacgatgtcgtagtttctcccatgtttgagtccacagctgcagatttggggtctgtggtacgcaagaacctgctatcagactgctctgtcgtctctacctccctagaggacaagcagcaggttccatctgaggacagtatggagaaggtgaaagtatacttgagggttaggcccttgttaccttcagagttggaacgacaggaagatcagggttgtgtccgtattgagaatgtggagacccttgttctacaagcacccaaggactcgtttgccctgaagagcaatgaacggggaattggccaagccacacacaggttcaccttttcccagatctttgggccagaagtgggacaggcatccttcttcaacctaactgtgaaggagatggtaaaggatgtactcaaagggcagaactggctcatctatacatatggagtcactaactcagggaaaacccacacgattcaaggtaccatcaaggatggagggattctcccccggtccctggcgctgatcttcaatagcctccaaggccaacttcatccaacacctgatctgaagcccttgctctccaatgaggtaatctggctagacagcaagcagatccgacaggaggaaatgaagaagctgtccctgctaaatggaggcctccaagaggaggagctgtccacttccttgaagaggagtgtctacatcgaaagtcggataggtaccagcaccagcttcgacagtggcattgctgggctctcttctatcagtcagtgtaccagcagtagccagctggatgaaacaagtcatcgatgggcacagccagacactgccccactacctgtcccggcaaacattcgcttctccatctggatctcattctttgagatctacaacgaactgctttatgacctattagaaccgcctagccaacagcgcaagaggcagactttgcggctatgcgaggatcaaaatggcaatccctatgtgaaagatctcaactggattcatgtgcaagatgctgaggaggcctggaagctcctaaaagtgggtcgtaagaaccagagctttgccagcacccacctcaaccagaactccagccgcagtcacagcatcttctcaatcaggatcctacaccttcagggggaaggagatatagtccccaagatcagcgagctgtcactctgtgatctggctggctcagagcgctgcaaagatcagaagagtggtgaacggttgaaggaagcaggaaacattaacacctctctacacaccctgggccgctgtattgctgcccttcgtcaaaaccagcagaaccggtcaaagcagaacctggttcccttccgtgacagcaagttgactcgagtgttccaaggtttcttcacaggccgaggccgttcctgcatgattgtcaatgtgaatccctgtgcatctacctatgatgaaactcttcatgtggccaagttctcagccattgctagccagcttgtgcatgccccacctatgcaactgggattcccatccctgcactcgttcatcaaggaacatagtcttcaggtatcccccagcttagagaaaggggctaaggcagacacaggccttgatgatgatattgaaaatgaagctgacatctccatgtatggcaaagaggagctcctacaagttgtggaagccatgaagacactgcttttgaaggaacgacaggaaaagctacagctggagatgcatctccgagatgaaatttgcaatgagatggtagaacagatgcaacagcgggaacagtggtgcagtgaacatttggacacccaaaaggaactattggaggaaatgtatgaagaaaaactaaatatcctcaaggagtcactgacaagtttttaccaagaagagattcaggagcgggatgaaaagattgaagagctagaagctctcttgcaggaagccagacaacagtcagtggcccatcagcaatcagggtctgaattggccctacggcggtcacaaaggttggcagcttctgcctccacccagcagcttcaggaggttaaagctaaattacagcagtgcaaagcagagctaaactctaccactgaagagttgcataagtatcagaaaatgttagaaccaccaccctcagccaagcccttcaccattgatgtggacaagaagttagaagagggccagaagaatataaggctgttgcggacagagcttcagaaacttggtgagtctctccaatcagcagagagagcttgttgccacagcactggggcaggaaaacttcgtcaagccttgaccacttgtgatgacatcttaatcaaacaggaccagactctggctgaactgcagaacaacatggtgctagtgaaactggaccttcggaagaaggcagcatgtattgctgagcagtatcatactgtgttgaaactccaaggccaggtttctgccaaaaagcgccttggtaccaaccaggaaaatcagcaaccaaaccaacaaccaccagggaagaaaccattccttcgaaatttacttccccgaacaccaacctgccaaagctcaacagactgcagcccttatgcccggatcctacgctcacggcgttcccctttactcaaatctgggccttttggcaaaaagtactaaggctgtggggaaagagaagagcagtcatggccctgaggtgggtcagctactctcctgaagaaataggtctcttttatgctttaccatatatcaggaattatatccaggatgcaatactcagacactagcttttttctcacttttgtattataaccacctatgtaatctcatgttgttgtttttttttatttacttatatgatttctatgcacacaaaaacagttatattaaagatattattgttcacattttttattgaaaaaaaaaaaaaa

SEQ ID NO: 14 - protein, 890 aa, Homo Sapiens
MSQGILSPPAGLLSDDDVVVSPMFESTAADLGSVVRKNLLSDCSVVSTSLEDKQQVPSEDSMEKVKVYLRVRPLLPSELERQEDQGCVRIENVETLVLQAPKDSFALKSNERGIGQATHRFTFSQIFGPEVGQASFFNLTVKEMVKDVLKGQNWLIYTYGVTNSGKTHTIQGTIKDGGILPRSLALIFNSLQGQLHPTPDLKPLLSNEVIWLDSKQIRQEEMKKLSLLNGGLQEEELSTSLKRSVYIESRIGTSTSFDSGIAGLSSISQCTSSSQLDETSHRWAQPDTAPLPVPANIRFSIWISFFEIYNELLYDLLEPPSQQRKRQTLRLCEDQNGNPYVKDLNWIHVQDAEEAWKLLKVGRKNQSFASTHLNQNSSRSHSIFSIRILHLQGEGDIVPKISELSLCDLAGSERCKDQKSGERLKEAGNINTSLHTLGRCIAALRQNQQNRSKQNLVPFRDSKLTRVFQGFFTGRGRSCMIVNVNPCASTYDETLHVAKFSAIASQLVHAPPMQLGFPSLHSFIKEHSLQVSPSLEKGAKADTGLDDDIENEADISMYGKEELLQVVEAMKTLLLKERQEKLQLEMHLRDEICNEMVEQMQQREQWCSEHLDTQKELLEEMYEEKLNILKESLTSFYQEEIQERDEKIEELEALLQEARQQSVAHQQSGSELALRRSQRLAASASTQQLQEVKAKLQQCKAELNSTTEELHKYQKMLEPPPSAKPFTIDVDKKLEEGQKNIRLLRTELQKLGESLQSAERACCHSTGAGKLRQALTTCDDILIKQDQTLAELQNNMVLVKLDLRKKAACIAEQYHTVLKLQGQVSAKKRLGTNQENQQPNQQPPGKKPFLRNLLPRTPTCQSSTDCSPYARILRSRRSPLLKSGPFGKKY

SEQ ID NO: 15 - DNA, 2946 bp, Homo Sapiens
  CDS (408)...(2645)
tcctggaattgcacgcgcttcctgaccaccaggctctggcccttgagaagccagcggggctttgtccctgttgctctccttgccaaacccagtctctctgctagtggtggtttcggttgcgacaccgtccaggttcccaggcaggaaccgctcggcctggctgcttagctacttttcactgaggaggtggtggaaggtgtcgcctgctctggctgagtaagggtggctggctgagccggcagcccccgccctaggcctggctcttcccggcctctgtactttgccctcgctgcctgacaggttctgctgtgggctctgctgaatggaagtcgctggtagtccttttccctttctccagtcggcccaccttgggacaccttgactccaagcccagcagtaagtccaacatgattcggggccgcaactcagccacctctgctgatgagcagccccacattggaaactaccggctcctcaagaccattggcaagggtaattttgccaaggtgaagttggcccgacacatcctgactgggaaagaggtagctgtgaagatcattgacaagactcaactgaactcctccagcctccagaaactattccgcgaagtaagaataatgaaggttttgaatcatcccaacatagttaaattatttgaagtgattgagactgagaaaacgctctaccttgtcatggagtacgctagtggcggagaggtatttgattacctagtggctcatggcaggatgaaagaaaaagaggctcgagccaaattccgccagatagtgtctgctgtgcagtactgtcaccagaagtttattgtccatagagacttaaaggcagaaaacctgctcttggatgctgatatgaacatcaagattgcagactttggcttcagcaatgaattcacctttgggaacaagctggacaccttctgtggcagtcccccttatgctgccccagaactcttccagggcaaaaaatatgatggacccgaggtggatgtgtggagcctaggagttatcctctatacactggtcagcggatccctgccttttgatggacagaacctcaaggagctgcgggaacgggtactgagggggaaataccgtattccattctacatgtccacggactgtgaaaacctgcttaagaaatttctcatccttaatcccagcaagagaggcactttagagcaaatcatgaaagatcgatggatgaatgtgggtcacgaagatgatgaactaaagccttacgtggagccactccctgactacaaggacccccggcggacagagctgatggtgtccatgggttatacacgggaagagatccaggactcgctggtgggccagagatacaacgaggtgatggccacctatctgctcctgggctacaagagctccgagctggaaggcgacaccatcaccctgaaaccccggccttcagctgatctaaccaatagcagcgcccaattcccatcccacaaggtacagcgaagcgtgtcggccaatcccaagcagcggcgcttcagcgaccaggctggtcctgccattcccacctctaattcttactctaagaagactcagagtaacaacgcagaaaataagcggcctgaggaggaccgggagtcagggcggaaagccagcagcacagccaaggtgcctgccagccccctgcccggtctggagaggaagaagaccaccccaaccccctccacgaacagcgtcctctccaccagcacaaatcgaagcaggaattccccacttttggagcgggccagcctcggccaggcctccatccagaatggcaaagacagcctaaccatgccagggtcccgggcctccacggcttctgcttctgccgcagtctctgcggcccggccccgccagcaccagaaatccatgtcggcctccgtgcaccccaacaaggcctctgggctgccccccacggagagtaactgtgaggtgccgcggcccagcacagccccccagcgtgtccctgttgcctccccatccgcccacaacatcagcagcagtggtggagccccagaccgaactaacttcccccggggtgtgtccagccgaagcaccttccatgctgggcagctccgacaggtgcgggaccagcagaatttgccctacggtgtgaccccagcctctccctctggccacagccagggccggcggggggcctctgggagcatcttcagcaagttcacctccaagtttgtacgcaggaacctgaatgaacctgaaagcaaagaccgagtggagacgctcagacctcacgtggtgggcagtggcggcaacgacaaagaaaaggaagaatttcgggaggccaagccccgctccctccgcttcacgtggagtatgaagaccacgagctccatggagcccaacgagatgatgcgggagatccgcaaggtgctggacgcgaacagctgccagagcgagctgcatgagaagtacatgctgctgtgcatgcacggcacgccgggccacgaggacttcgtgcagtgggagatggaggtgtgcaaactgccgcggctctctctcaacggggttcgatttaagcggatatcgggcacctccatggccttcaaaaacattgcctccaaaatagccaacgagctgaagctttaacaggctgccaggagcgggggcggcgggggcgggccagctggacgggctgccggccgtgcgccgccccacctgggcgagactgcagcgatggattggtgtgtctccctgctggcacttctcccctccctggcccttctcagttttctcccacattcacccctgcccagagattcccccttctcctctcccctactggaggcaaaggaaggggagggtggatgggggggcagggctccccctcggtactgcggttgcacagagtatttcgcctaaaccaagaaattttttattaccaaaaaga

SEQ ID NO: 16 - protein, 745 aa, Homo Sapiens
MIRGRNSATSADEQPHIGNYRLLKTIGKGNFAKVKLARHILTGKEVAVKIIDKTQLNSSSLQKLFREVRIMKVLNHPNIVKLFEVIETEKTLYLVMEYASGGEVFDYLVAHGRMKEKEARAKFRQIVSAVQYCHQKFIVHRDLKAENLLLDADMNIKIADFGFSNEFTFGNKLDTFCGSPPYAAPELFQGKKYDGPEVDVWSLGVILYTLVSGSLPFDGQNLKELRERVLRGKYRIPFYMSTDCENLLKKFLILNPSKRGTLEQIMKDRWMNVGHEDDELKPYVEPLPDYKDPRRTELMVSMGYTREEIQDSLVGQRYNEVMATYLLLGYKSSELEGDTITLKPRPSADLTNSSAQFPSHKVQRSVSANPKQRRFSDQAGPAIPTSNSYSKKTQSNNAENKRPEEDRESGRKASSTAKVPASPLPGLERKKTTPTPSTNSVLSTSTNRSRNSPLLERASLGQASIQNGKDSLTMPGSRASTASASAAVSAARPRQHQKSMSASVHPNKASGLPPTESNCEVPRPSTAPQRVPVASPSAHNISSSGGAPDRTNFPRGVSSRSTFHAGQLRQVRDQQNLPYGVTPASPSGHSQGRRGASGSIFSKFTSKFVRRNLNEPESKDRVETLRPHVVGSGGNDKEKEEFREAKPRSLRFTWSMKTTSSMEPNEMMREIRKVLDANSCQSELHEKYMLLCMHGTPGHEDFVQWEMEVCKLPRLSLNGVRFKRISGTSMAFKNIASKIANELKL

SEQ ID NO: 17 - DNA, 5457 bp, Homo Sapiens
  CDS (313)...(3342)
ttcgcctctctcatgatcccaggaagactaacaggctctttgtgacactggcactgcgctgtcggatccagctgttgtcattgtgaaggggtgttctcttcctcatttcctgaaggatttgttgcagaaggagacggcgtcgacgtctgactggactcgcggcgacttacctttcagtcgtgcgctcctgatccggcgctcggaatttgtccccggcttcagggctgcggggcctggaaggaggcgtatcgaggcggctcgaaaacgatccaggggagccgaggcgctcctcttgtcatcccactcagcgccatgtcctggatgttcaagagggatccagtttggaagtacttgcagactgtccagtatggagttcatggaaattttccacgcctctcatatccaactttctttctacgttttgaattccaagatgttatccctccagatgactttctaactagtgatgaagaagtagattccgttttatttggaagtttgagaggtcatgtggttggactacgctattacacgggagtagttaataataatgaaatggttgcattacaacgagatcctaataacccttatgataagaatgcaattaaagtaaacaatgtgaatggaaatcaagttggccatttaaagaaagagcttgcaggtgctttggcctatatcatggacaacaaattggcacaaattgaaggggtagttccttttggtgcaaacaatgcttttaccatgcctctgcatatgactttttggggaaaagaagaaaatagaaaagcggtttcagatcagttgaagaaacatggatttaaattgggtcctgcaccaaaaactttaggattcaatttggaaagtggttggggctctggaagagctggaccaagctatagtatgccagtgcatgctgcagtacagatgacaactgaacagcttaaaacagaatttgacaaattgtttgaagatttaaaagaagatgataaaacccatgaaatggaaccagctgaggctattgaaacaccactgcttccacatcaaaaacaagctctagcttggatggtgtcacgggaaaatagcaaagaacttccaccattctgggaacagcgaaatgacttatactataacacaataacaaatttttctgagaaggaccgaccagaaaatgtccatggaggaattttagctgatgatatgggtttgggtaaaactcttacggccattgcagtaatccttaccaacttccatgatggcagacctcttcctattgaaagagttaaaaagaatctactgaagaaggaatataatgttaacgatggctctatgaaacttggaggaaacaataccagtgaaaaggcagatggactaagcaaagacgcatctagatgtagtgaacaacccagtatttcagatatcaaggagaagagtaagtttcgcatgtcagaattgtctagctcccgccccaaaagaagaaaaactgctgtccagtacatagaaagcagtgattcagaggaaattgaaacaagtgaattgccgcagaaaatgaaaggcaaactgaaaaatgtacagtctgaaactaaaggcagggcgaaagcaggatcttctaaggttatagaagatgtggcatttgcatgtgcattaacttcatctgttcctacaacaaaaaagaaaatgttgaaaaagggagcttgtgcagtggaggggtcaaagaaaactgatgttgaggagagaccaagaacaacactgatcatctgtccgctttctgtgttaagcaactggattgaccagtttggacaacatataaaatcagatgtacacttgaatttttatgtttattatggtcctgatcgtattagagaaccggccttactttcaaaacaggatattgttttgactacgtataatattttaactcatgactatggaactaaaggagatagtccattacatagcataaggtggctaagagtgatcctggatgaaggacatgccatacgaaatccaaatgctcagcagacaaaagctgtacttgacttagaatcagaaagaagatgggttttgacaggtactccaatccagaattctttaaaggacttgtggtctcttctttcctttttaaaacttaaaccatttattgatagagaatggtggcatagaacaatacagcgtcctgtcacaatgggagatgaaggaggacttaggcgtttacagtccctaattaaaaatattacacttagaagaacaaagacaagcaaaattaaaggaaaacctgttttggagttaccagaacgtaaagtatttattcagcacattacactttcagatgaagagagaaagatttatcagtctgtgaaaaatgaaggcagagccactattggaaggtattttaatgaagggactgtcctggcacattatgcagatgtcctgggtcttttgcttagactgcggcaaatttgttgccatacttaccttcttacaaatgcagtgtcttccaatggcccctcaggaaatgatacacctgaagaactgagaaagaagttaataaggaagatgaagttaattctgagctcaggttcagatgaggaatgtgcaatttgcctggattctttaacagttcctgtgataacacattgtgcacatgtattttgtaaaccctgtatttgccaagtcattcagaatgagcagccacatgctaaatgccctttatgcagaaatgatatacatgaagataatttattagaatgtcctccagaagaattagcacgtgacagtgagaaaaagtctgatatggaatggacatccagttcaaagattaatgcgctaatgcacgcattgactgacttaagaaagaagaatcccaacataaaaagtttggttgtttctcagtttacaacattcctgtctttaatagaaataccacttaaagcctctggatttgtgtttactcgtttggatggttccatggcccaaaagaaaagagttgaatcaattcagtgttttcaaaacactgaagcaggatctccaactataatgcttctgtccttaagagcaggtggagttggtttgaatctgtctgcagcttctcgagtgtttttaatggatccagcctggaatcctgctgctgaagatcagtgctttgacagatgccatagacttggtcagaagcaagaagttatcatcacaaaattcattgtaaaggactctgttgaagaaaatatgctgaaaatacaaaacaaaaagagagaacttgcagcaggagcctttggaactaaaaaaccaaatgctgacgaaatgaaacaagccaaaattaatgaaatcagaacattaattgacttataatttgtgggattttagtaaggtcagtttgattggatacttaagttttagaaatgagaaaaatacagagttttagaaatgagatctagagaacacgtcttctaaaaggggcatattttatattagtgaagaggtattactgacacaatttcttctatatatgaacctatttttaatgaaacttcaaatagcaataagttccgttatatactgtggcctgaaataatttgagaaaaaaggttactttgttattcagcttttcataatatctatgctgagtattttcacgtatcttccaagtactcagctttttcgtatttcaaataaggtcagaccttttatacttttgaccaaatagttaatttctatgttggacacttagttatttaccaaagcctccgatttgtgatgcagtgtttgtagtccttgtaaacaatatatacagactatacaagaattaattttattgggctttcaaaaaccatatttgcattccagaaccaaatcttaaatgagaccaaagtccaggttagcacaggtttttatttttcctacagctacattgagatatagttcacataaatgacttgggagttttatgttcatgaaaaaattagggattatgttaagagtactattttttccattttagtaaagtagtactacacacacattgtttaaatgtaactgctcgtgtctgaggtataaatatagtctgtgggagtgagagcaaaccagtcctacccaatttgatttgaatattttaaattatggaacctgctaaatagatatttctataaatagataatttttatttatgtagctttttttggaagtaactttataaatttttataattcagaagactactatatgtgagaggcgtgatatctggatggaagttgggctggatgatctccaaagtcgtttcaactcttaaagacatcttaatcctgaatgtaaacaattgttatgtgtttagaatcagaatttgattttgaacttgagtaattcatccttacagctatctgtagaattagtcatcttttttcttttcttttttttttacttttttgttaataagcaaacttatttgctgcagaatttgggttgactcctgagcatatttaaaacaaagaagctagaaatttagcagtcagattaggtaggtggttttatttcaaagggaaactttaatccaaagaaagattaattactctaacaaacaagagaagcttcatgtttgatgatacagatttaagaatacctgagacttaagagtgttggaagtcatttgatagaaaagatgagatcggagacaatgttgtgttatagggcacacattgaaggtatatgccaaatctctcacaagataagtccttttctccctgtgccgttttcttgctcaaagggaacagtgaattagccagctagaatcttcctggtccctttttgaggcagtagcaggtaaggaaagggctgattttcatcaaaaccaagacctttctgcaggcatgatagtggaataataatgtgggattagcccgctagcattaggagcagttgggaagttacctggtagatcaagcattacacacaaaaaatcaagttgatcagagtatgggttctgcatgtagcaatacttcagtgagattaagtataaacagtttttggcaaaaaacaacacagtctactctttctgcttacaaagacaaagccttacaaactcactatgaaggtgaaagggagacagcttgcttctttgcccagacatttacaaagttgtttttaaaacacactcataagtaagtttggcaagttgtttaaaaaatgtctctttgttttgtacagttctgttagatgttgttatattttaaaagtttaatttaaaaaatttaatttgtccttcctaagaaggataaatatataaaaaagccatctggaatgaaaacttcctatatgctagctgttgtcttattattatatagaaaaataactttagaaaaatattgaagacattgtattaccacttgtgattcaaacaattttgtggttaaaactggattttaaatttaaaaatcaataaaaatttcaaatgttaaaaaaaaaaaaaaaaaa

SEQ ID NO: 18 - protein, 1009 aa, Homo Sapiens [sequence omitted]

SEQ ID NO: 19 - DNA, 841 bp, Homo Sapiens
  CDS (72)...(614)
acccctcgtggcggtcccgcccgtccccgcgcaggcgcgctcgggctgccgctggctcttcgcacgcggccatggccgactccgagctgcagctggttgagcagcggatccgcagcttccccgacttccccaccccaggcgtggtattcagggacatctcgcccgtcctgaaggaccccgcctccttccgcgccgccatcggcctcctggcgcgacacctgaaggcgacccacgggggccgcatcgactacatcgcaggcctagactcccgaggcttcctctttggcccctccctggcccaggagcttggactgggctgcgtgctcatccgaaagcgggggaagctgccaggccccactctgtgggcctcctattccctggagtacgggaaggctgagctggagattcagaaagacgccctggagccaggacagagggtggtcgtcgtggatgatctgctggccactggtggaaccatgaacgctgcctgtgagctgctgggccgcctgcaggctgaggtcctggagtgcgtgagcctggtggagctgacctcgcttaagggcagggagaagctggcacctgtacccttcttctctctcctgcagtatgagtgaccacagggcctcccagcccaacatctccagctggatcccagggaaatatcagccttgggcaactgcagtgaccaggggcaccggctgcccacagggaacacattcctttgctggggttcagcgcctctcctggggctggaagtgccaaagcctggggcaaagctgtgtttcagccacactgaacccaattacacacagcgggagaacgcagtaaacagctttcccac

SEQ ID NO: 20 - protein, 180 aa, Homo Sapiens
MADSELQLVEQRIRSFPDFPTPGVVFRDISPVLKDPASFRAAIGLLARHLKATHGGRIDYIAGLDSRGFLFGPSLAQELGLGCVLIRKRGKLPGPTLWASYSLEYGKAELEIQKDALEPGQRVVVVDDLLATGGTMNAACELLGRLQAEVLECVSLVELTSLKGREKLAPVPFFSLLQYE

SEQ ID NO: 21 - DNA, 1748 bp, Homo Sapiens
  CDS (79)...(1164)
ctatagggagtcgccccgcgtccgggccggctgagggcacttgctcttgctgtttctgcccctgggttaacattcaagatggtacatgctgaagccttttctcgtcctttgagtcggaatgaagttgttggtttaattttccgtttgacaatatttggtgcagtgacatactttactatcaaatggatggtagatgcaattgatccaaccagaaagcaaaaagtagaagctcagaaacaggcagaaaaactaatgaagcaaattggagtgaaaaatgtgaagctctcagaatatgaaatgagtattgctgctcatcttgtagaccctcttaatatgcatgttacttggagtgatatagcaggtttagatgatgtcattacggatctgaaagacacagtcatcttacctatcaaaaagaaacatttgtttgagaattccaggcttctgcagcctccaaaaggtgttcttctctatgggcctccaggctgtggtaaaacgttgattgccaaggccacagccaaagaagcaggctgtcgatttattaaccttcagccttcgacactgaccgataagtggtatggagaatctcagaaattggctgctgctgtcttctcccttgccataaagctacaaccatccatcatctttatagatgaaatagactcctttctacgaaaccgttcaagttctgaccatgaagctacagccatgatgaaagctcagtttatgagtctctgggatggattggatactgatcacagctgccaggtcatagtaatgggagctaccaatcgtcctcaggaccttgactcggctataatgagaagaatgcctacaagatttcatatcaaccagcctgctttaaaacagagagaagcaatcctgaaactcatcttgaaaaatgaaaatgtggataggcatgtagacctgctagaagttgcccaggaaactgatgggttttcaggaagtgacctaaaagagatgtgtcgagatgctgccctcctctgtgttagagaatatgttaattctacatcagaagaaagccatgacgaagatgaaattcggcctgttcaacagcaggacctgcatcgggcaattgaaaagatgaagaaatcaaaggatgcagcatttcagaatgttttaacacatgtttgtttagattaagagtaaagatcatttgtacagttcagtgatctagtttggtgtgtcctcttatcagttagtggaaatagaacggaaagagtgctctttaaacaatgagggagctcagtgtttatggttttatactctgaattctaagttattgagatatagttgttacataggtggtattactgttggtcaaaaatcatgaggaggaacagttgaatccagcctgaacgtgggtgcttgtgtttgaccttttcagccatatattgtacagccttatagaatctaagctggtcttaaagtcataaatgattcattgggtcattagtgagaaacggggatgtggttaggtgctggttcctagacatgtgagtatgcgtttgtgtgtgtgcgtgtatgtatgtgtatattaaatgtatatatccacacattttatattgacattctgtagatatgtttgaatatagaaactttttttaccccaactactgaatccaggagtaccaaataatatatagtaaaactaagatttaaggttgtgtcaaaaaggtacagtggattcagccatttccatttgtcatttgtttcaacctttttta

SEQ ID NO: 22 - protein, 361 aa, Homo Sapiens
MVHAEAFSRPLSRNEVVGLIFRLTIFGAVTYFTIKWMVDAIDPTRKQKVEAQKQAEKLMKQIGVKNVKLSEYEMSIAAHLVDPLNMHVTWSDIAGLDDVITDLKDTVILPIKKKHLFENSRLLQPPKGVLLYGPPGCGKTLIAKATAKEAGCRFINLQPSTLTDKWYGESQKLAAAVFSLAIKLQPSIIFIDEIDSFLRNRSSSDHEATAMMKAQFMSLWDGLDTDHSCQVIVMGATNRPQDLDSAIMRRMPTRFHINQPALKQREAILKLILKNENVDRHVDLLEVAQETDGFSGSDLKEMCRDAALLCVREYVNSTSEESHDEDEIRPVQQQDLHRAIEKMKKSKDAAFQNVLTHVCLD

SEQ ID NO: 23 - DNA, 1529 bp, Homo Sapiens
  CDS (57)...(980)
  misc_feature (1)...(1529): n = A,T,C or G
cggcccccgggagctgtgctctatggagctattgcggccgtgggtggtcgcgggcgatgcggggctgccagctcctcgggcttcgtagctcttggcccggggacctactaagtgctcggctcttgtcccaagagaagcgggcagcggaaacgcactttgggtttgagactgtgtcggaagaggagaaggggggcaaagtctatcaggtgtttgaaagtgtggctaagaagtatgatgtgatgaatgatatgatgagtcttggtatccatcgtgtttggaaggatttgctgctctggaagatgcacccgcttcctgggacccagctgcttgatgttgctggaggcacaggtgacattgcattccggttccttaattatgttcagtcccagcatcagagaaaacagaagaggcagttaagggcccaacaaaatttatcctgggaagaaattgccaaagagtaccagaatgaagaagattccttgggcgggtctcgtgtcgtggtgtgtgacatcaacaaggagatgctaaaggttggaaagcagaaagccttggctcaaggatacagagctggacttgcatgggtattaggagatgctgaagaactgccctttgatgatgacaagtttgatatttacaccattgcctttgggatccggaatgtcacacacattgatcaggcactccaggaagctcatcgggtgctgaaaccaggaggacggtttctctgtctggaatttagccaagtgaacaatcccctcatatccaggctttatgatctatatagcttccaggtcatccctgtcctgggagaggtcatcgctggagactggaagtcctatcagtaccttgtagagagtatccgaaggtttccgtctcaggaagagttcaaggacatgatagaagatgcaggctttcacaaggtgacttacgaaagtctaacatcaggcattgtggccattcattctggcttcaaactttaattcctttcctatcatggagcatgaaccagtcatatcctgttgaaagcctggaactgaaggataatctggcaaatgagacagcagcagagcatctcctcttaaggatacgtgccttggactcatgtttgaatcgaacagtctcraagtggaagaacaaattcttgtcacttttttacagctttctttggagctgcttcagtccatctcccagaggcatttggtctgtatctttgctcaactgctaatttctcttggctgtagggtgtgtggttaaggtacaaccacccctaaagctcagttttgaagtgagtgtatttatagcttctctgctggtgctgccttctagagggatgatagatcatttgaacccaatgacaatttttaaccagaaaatttaattgtacctgaatcaacctttcagcctaggacgaagtctaggcccaagtcagagtattaatgatcatgagaattgtgtgctgaaccagtaaacgagtttaccttttgaaaaaaaaaaaaaaaaaaaaaaaaaaaaaaaaarnggcggccgct

SEQ ID NO: 24 - protein, 307 aa, Homo Sapiens [sequence omitted]

SEQ ID NO: 25 - DNA, 1249 bp, Homo Sapiens
  CDS (53)...(1006)
ggcggaggccgcgccgggagcgcggtggggctaggcgtggggcgctcccggcatgtccctgtaccgcagcgtcgtgtggttcgccaaggggctgcgcgagtacaccaagagtggctatgaatctgcatgtaaagactttgtccctcatgacttggaggtccagattcctggaagagtctttttggtcactggaggaaacagcggcattggcaaagcaactgcccttgaaatcgccaagcgaggtggcacagttcacctggtttgtcgagatcaagccccagcagaagatgccaggggtgagatcatccgagagagcggtaaccagaacatttttctgcacattgtggacttgtctgatcccaagcaaatctggaaatttgttgaaaatttcaagcaggaacataaactccatgttctgatcaataatgcaggttgcatggtcaataaaagagagctcacagaagatggacttgaaaaaaactttgctgccaatactctgggtgtgtacattctcacgaccggcctgatccctgtgctggagaaagaacacgacccccgagtgataaccgtctcctcaggaggaatgttggttcagaaactgaacaccaatgatctccagtccgaaagaacaccatttgatggaactatggtctatgcacaaaacaagaggcagcaagtggttctgacggagcggtgggcccaagggcacccggccatccatttttcttccatgcatcctggctgggccgacaccccaggtgtgaggcaggcgatgccggggttccacgccaggttcggggaccgcctgcgctccgaggcccagggcgcggacaccatgctgtggctggccctctcctctgccgcagccgcacagcccagcggccgcttctttcaagatcggaagccagtttctacacacttgcctctcgctacagcgtcctcctcaccggccgaagaggagaaactcattgaaatcctggaacagctggctcagacatttaaataggccaacccagacacagtgcggtaccagaattgccttagaagataccagaaggtgcggtctagggaccagtgaataagaagaccccacttcaacttcccctcgaagacgttgtgcctcacagcgaggcctacaagggatgggaacttttatttcaaaataaatactaccgaggctgtgatcaggctcaccttgaaaaaaaaaaaaaacctagactcgagcaagcttatgcatgcatgcggccgc

SEQ ID NO: 26 - protein, 317 aa, Homo Sapiens
MSLYRSVVWFAKGLREYTKSGYESACKDFVPHDLEVQIPGRVFLVTGGNSGIGKATALEIAKRGGTVHLVCRDQAPAEDARGEIIRESGNQNIFLHIVDLSDPKQIWKFVENFKQEHKLHVLINNAGCMVNKRELTEDGLEKNFAANTLGVYILTTGLIPVLEKEHDPRVITVSSGGMLVQKLNTNDLQSERTPFDGTMVYAQNKRQQVVLTERWAQGHPAIHFSSMHPGWADTPGVRQAMPGFHARFGDRLRSEAQGADTMLWLALSSAAAAQPSGRFFQDRKPVSTHLPLATASSSPAEEEKLIEILEQLAQTFK

SEQ ID NO: 27 - DNA, 4396 bp, Homo Sapiens
  CDS (148)...(534)
ttcaagcccaaccagacgcggacctacgaccgcgaggacttcaagaagcgggcggcgtgcctgtgcttccggagcgagcaggaggacgaggtgctgctggtgagtagcagccggtacccagaccagtggattgtcccaggaggaggaatggaacccgaggaggaacctggcggtgctgccgtgagggaagtttatgaggaggctggagtcaaaggaaaactaggcagacttctgggcatatttgagaaccaagaccgaaagcacagaacatatgtttatgttctaacagtcactgaaatattagaagattgggaagattctgttaatattggaaggaagagagagtggttcaaagtagaagatgctatcaaagttctccagtgtcataaacctgtacatgcagagtatctggaaaagctaaagctgggttgttccccagccaatggaaattctacagtcccttcccttccggataataatgtcttgtttgtaaccgctgcacagacctctgggttgccatctagtgtaagatagagagaactgggtaggcctctcccaccatgtgcagtctcatggggagaggcttctttcgtttcctcgtcaaacacctgattgacgcttgcaaactgtctgaatttgccatgcaaggttttcaaacaatttgcatgtttttcagatgctttcaaatctttttttaaaaaaatagtgtaaaatattttaataagccaaagccatgtggaatttttgtttagatgccttaactgtgccacaccccacaaccccctatattattttggttgtctatttctcacagcatattttcagttttttgtccatttgacatcagtctgtggtttattttgtcatcagattacttgtgggtatacctaccccaaaattgttttctcattcacagcattagcatattcagcaaatccatctgtggtgggaattaaaaatattattggtattaaagaaatccattcaccccaaaacttgttttacaggattacaattttaattcaaaatttccagatttgggctatttctgtatgatccaataacttattttgtcacagggcttaatttgccatttttggggatttgtcgactcattttgtctgaattttcacaactggtattatgtcactagctacctgatacggctatttcccttataactcaatagtaccttaacacaaagtataactctgtagagttggtgaatattttagggaaatattagcaaaatgcatgtagtaaagacatcttatgaaaactgtattcacggaatttgatttagcatgctcagtagccagttcccattatcgatactctttctttgcagaataccttagaaccgtcatttccctcagtgtagattgctcttaaaatgtattcagttatttagtggcccccacaggagtggagtcttgaaatctaattctaaatgccagtcagtgatgatcgcatcacagttgagtgaaatggccttcctgttcagctgttagagactgaagattgttagggcaccttagaatgtctcatcttttctaggttgtcaacaggtactatttgtcacataactaactttcgaggcactggaacatacctgaactaagaattaaatcttttactttatactcacttaaaatcaagaatcccatctaaaacacataggtaccttatctgaaactcttgcacttccccaaccagggcggaaatgaggtgggagaagtttgactaaaatgagggatgggggaaagtaaaagatgtttttttttttttttgagactcgctttgtcacccaggctggagtgcaatggcacaatctcaactcaccgcaacctccgcctcccgggttcaagcgattctcctgcctcagcctcccgagtagttgggattacaggcgcctgcctccatgcctggctaattttgtatttttagtagagacagggtttcttcatgttggtcaggctggtctcaaactcctaacctcgtgatccgcctgcctcgacctcccaaagtgctgggattacaggcatgagccaccatgcccagccaaagatcatttttttatatagacttcagccctttgtaaatattgtaactggggagtatagagtagaaaaaaagtatagttacaacatttgttctacaaattaacctttaaaaatataattactgctaaaaatagagtgctgttacacttaaggaaaattagtgccattttggaaatgagatcttgtgccataaatacagctgaactgaatataaatgttcacaaattaatgctgtcaaaggaatgagtaaagcagaaaaacttttaaccagcaacatttcaagtacgtagtgtgatcaaacatgatcatccagaatttttatatttttttctttgtacagaggttacatattctgggtgttcttttataaaggaaacattttaaatcccacaaattgacactttctatcttcaatggactaagatttttttggtcagtaatctctgaaatttccttaaattatatacttaacatagcagagaaactggattgtttttgtatataagactgcttccacctgaaatgctgtcataagtactgggggggtgggggagtgcccatcttgtacatgatattcttagaggtaataaggtaatgatgcatgaatttattttataaactcttggactatgtatttgacatgtaaaatatgtacagtattaacgtcaaccatctctttaaagttagcctataaatattgttgtataattttctttggtcagaaacacttggactgaatagtgacactcggtaaggattttcagtgccatttagcaaaacgtctttagtctatgcaactagcaaaaatctgcataatgcaacaacacagttttcacacttcaaattttacatgaggggttcttcacgattctcctggaacccagtctagcaaaatgagaggaaaggccctagggagatttatttctgttaaatagttaactctgctgagtatgacaaatagtgtctactatctcaaccctccaaaatttgcagagtgttgggactgtcatttgtgattttttttttttttggtggggtagttgaataaaattgggcagctaaatttttcagtttcatgtgcctcccaaataaaaaacagaaaataagtagtttttgtgaattgacttgcagacaaagtagaaactgtgctgcatgatgttattttgtaaacagatgacattttctgaccaggcacatgccatccaattttctgtcaatcacactgttgtataaagcagcagaactgaaggggaaaaatgattgttgtatacactgaattgctttgcatggtctcatttgagataattgatgtaagaatcctgactttttatatttggaaacatcaaataaaaatggaaaaaatgatcatggctttaaaaaaaaaacaaaaacacacacacatgaactcagatttgcaaaccaggtttctgaaactttgggtaaggtgtatgcttttaactttgaaatgtataaacacccagcggaaacgtatacctttcagtgcatagtgcattgtgtgcttaccctgggttgtttaaacttgtgttcaaatattccccctccaagtgaaagcctgtcgggaattccacagtaacacctttactgttctcccattgatgatcatatacgttacctcttcctagcggtacatttgtatgatccttactactggaattaccgggttaaaaggaaatgcttaccactaagatgtcagtattctcctcatggatattttcagtctcaatgttgccagtctaatagtatagtatgtggttgctttactgctgttctccccacccccgtggagttgtgtcattattttaatgaatgtgagctcttgacttactctagaattctaatacagatactttctgcactagtatcacttttattattgcagttccatttaaaagcataactggctaagtcaccgccccacccgccgcattacatttcctaaaacatactgctgccaaagaccaactgtagaatccttaagtcctgttcaagtgtcacttcattttttattaggggtttcttagttggagggcatgagaaacttggccctttccaatgttgtcttcacattggagtataagaattctctataggactctttaatttttttttttggtagagatggggtcttgctgtgttgcccaggctggtctcaaactcctaggcttaagcagtcctccagcctcagccttctcaaggtgctaggatgattggcatgagccacctcgtctggcctgcaggtctttttaagcatttgctgttcaataataagcatcttctttatgcctagtatttgtgataagagcacaaaacaa

SEQ ID NO: 28 - protein, 128 aa, Homo Sapiens
MEPEEEPGGAAVREVYEEAGVKGKLGRLLGIFENQDRKHRTYVYVLTVTEILEDWEDSVNIGRKREWFKVEDAIKVLQCHKPVHAEYLEKLKLGCSPANGNSTVPSLPDNNVLFVTAAQTSGLPSSVR

SEQ ID NO: 29 - DNA, 1382 bp, Homo Sapiens
  CDS (61)...(1284)
ggccttatctttccagtcgtccagcatgctctgcccaccccacgccgaggtgcactgaccatgagcctcaactcctccctcagctgcaggaaggagctgagtaatctcactgaggaggagggtggcgaagggggcgtcatcatcacccagttcatcgccatcattgtcatcaccatttttgtctgcctgggaaacctggtcatcgtggtcaccttgtacaagaagtcctacctcctcaccctcagcaacaagttcgtcttcagcctgactctgtccaacttcctgctgtccgtgttggtgctgccttttgtggtgacgagctccatccgcagggaatggatctttggtgtagtgtggtgcaacttctctgccctcctctacctgctgatcagctctgccagcatgctaaccctcggggtcattgccatcgaccgctactatgctgtcctgtaccccatggtgtaccccatgaagatcacagggaaccgggctgtgatggcacttgtctacatctggcttcactcgctcatcggctgcctgccacccctgtttggttggtcatccgtggagtttgacgagttcaaatggatgtgtgtggctgcttggcaccgggagcctggctacacggccttctggcagatctggtgtgccctcttcccctttctggtcatgctggtgtgctatggcttcatcttccgcgtggccagggtcaaggcacgcaaggtgcactgtggcacagtcgtcatcgtggaggaggatgctcagaggaccgggaggaagaactccagcacctccacctcctcttcaggcagcaggaggaatgcctttcagggtgtggtctactcggccaaccagtgcaaagccctcatcaccatcctggtggtcctcggtgccttcatggtcacctggggcccctacatggttgtcatcgcctctgaggccctctgggggaaaagctccgtctccccgagcctggagacttgggccacatggctgtcctttgccagcgctgtctgccaccccctgatctatggactctggaacaagacagttcgcaaagaactactgggcatgtgctttggggaccggtattatcgggaaccatttgtgcaacgacagaggacttccaggctcttcagcatttccaacaggatcacagacctgggcctgtccccacacctcactgcgctcatggcaggtggacagcccctggggcacagcagcagcacgggggacactggcttcagctgctcccaggactcaggtaacctgcgtgctttataagcctctcacctgtcgcgttttccctgtgttgcgtttcccccgtgtcgcgtttcccctgtgcaggctcaagagctggcggaggggcatttcccacggtg

SEQ ID NO: 30 - protein, 407 aa, Homo Sapiens
MSLNSSLSCRKELSNLTEEEGGEGGVIITQFIAIIVITIFVCLGNLVIVVTLYKKSYLLTLSNKFVFSLTLSNFLLSVLVLPFVVTSSIRREWIFGVVWCNFSALLYLLISSASMLTLGVIAIDRYYAVLYPMVYPMKITGNRAVMALVYIWLHSLIGCLPPLFGWSSVEFDEFKWMCVAAWHREPGYTAFWQIWCALFPFLVMLVCYGFIFRVARVKARKVHCGTVVIVEEDAQRTGRKNSSTSTSSSGSRRNAFQGVVYSANQCKALITILVVLGAFMVTWGPYMVVIASEALWGKSSVSPSLETWATWLSFASAVCHPLIYGLWNKTVRKELLGMCFGDRYYREPFVQRQRTSRLFSISNRITDLGLSPHLTALMAGGQPLGHSSSTGDTGFSCSQDSGNLRAL

SEQ ID NO: 31 - DNA, 3492 bp, Homo Sapiens
  CDS (104)...(3007)
ccgccsgcggtgcagcccgccgggaccgggaggcggcagctgcggccaccgcgccgtgcgtccgcgcccggccgccaggtgccccagtagcccgaccgccgagatgcccagcccgccggggctccgggcgctatggctttgcgccgcgctgtgcgcttcccggagggccggcggcgccccccagcccggcccggggcccaccgcctgcccggccccctgccactgccaggaggacggcatcatgctgtctgccgactgctctgagctcgggctgtccgccgttccgggggacctggaccccctgacggcttacctggacctcagcatgaacaacctcacagagcttcagcctggcctcttccaccacctgcgcttcttggaggagctgcgtctctctgggaaccatctctcacacatcccaggacaagcattctctggtctctacagcctgaaaatcctgatgctgcagaacaatcagctgggaggaatccccgcagaggcgctgtgggagctgccgagcctgcagtcgctgcgcctagatgccaacctcatctccctggtcccggagaggagctttgaggggctgtcctccctccgccacctctggctggacgacaatgcactcacggagatccctgtcagggccctcaacaacctccctgccctgcaggccatgaccctggccctcaaccgcatcagccacatccccgactacgcgttccagaatctcaccagccttgtggtgctgcatttgcataacaaccgcatccagcatctggggacccacagcttcgaggggctgcacaatctggagacactagacctgaattataacaagctgcaggagttccctgtggccatccggaccctgggcagactgcaggaactggggttccataacaacaacatcaaggccatcccagaaaaggccttcatggggaaccctctgctacagacgatacacttttatgataacccaatccagtttgtgggaagatcggcattccagtacctgcctaaactccacacactatctctgaatggtgccatggacatccaggagtttccagatctcaaaggcaccaccagcctggagatcctgaccctgacccgcgcaggcatccggctgctcccatcggggatgtgccaacagctgcccaggctccgagtcctggaactgtctcacaatcaaattgaggagctgcccagcctgcacaggtgtcagaaattggaggaaatcggcctccaacacaaccgcatctgggaaattggagctgacaccttcagccagctgagctccctgcaagccctggatcttagctggaacgccatccggtccatccaccctgaggccttctccaccctgcactccctggtcaagctggacctgacagacaaccagctgaccacactgcccctggctggacttgggggcttgatgcatctgaagctcaaagggaaccttgctctctcccaggccttctccaaggacagtttcccaaaactgaggatcctggaggtgccttatgcctaccagtgctgtccctatgggatgtgtgccagcttcttcaaggcctctgggcagtgggaggctgaagaccttcaccttgatgatgaggagtcttcaaaaaggcccctgggcctccttgccagacaagcagagaaccactatgaccaggacctggatgagctccagctggagatggaggactcaaagccacaccccagtgtccagtgtagccctactccaggccccttcaagccctgtgagtacctctttgaaagctggggcatccgcctggccgtgtgggccatcgtgttgctctccgtgctctgcaatggactggtgctgctgaccgtgttcgctggcgggcctgcccccctgcccccggtcaagtttgtggtaggtgcgattgcaggcgccaacaccttgactggcatttcctgtggccttctagcctcagtcgatgccctgacctttggtcagttctctgagtacggagcccgctgggagacggggctaggctgccgggccactggcttcctggcagtacttgggtcggaggcatcggtgctgctgctcactctggccgcagtgcagtgcagcgtctccgtctcctgtgtccgggcctatgggaagtccccctccctgggcagcgttcgagcaggggtcctaggctgcctggcactggcagggctggccgccgcactgcccctggcctcagtgggagaatacggggcctccccactctgcctgccctacgcgccacctgagggtcagccagcagccctgggcttcaccgtggccctggtgatgatgaactccttctgtttcctggtcgtggccggtgcctacatcaaactgtactgtgacctgccgcggggcgactttgaggccgtgtgggactgcgccatggtgaggcacgtggcctggctcatcttcgcagacgggctcctctactgtcccgtggccttcctcagcttcgcctccatgctgggcctcttccctgtcacgcccgaggccgtcaagtctgtcctgctggtggtgctgcccctgcctgcctgcctcaacccactgctgtacctgctcttcaacccccacttccgggatgaccttcggcggcttcggccccgcgcaggggactcagggcccctagcctatgctgcggccggggagctggagaagagctcctgtgattctacccaggccctggtagccttctctgatgtggatctcattctggaagcttctgaagctgggcggccccctgggctggagacctatggcttcccctcagtgaccctcatctcctgtcagcagccaggggcccccaggctggagggcagccattgtgtagagccagaggggaaccactttgggaacccccaaccctccatggatggagaactgctgctgagggcagagggatctacgccagcaggtggaggcttgtcagggggtggcggctttcagccctctggcttggcctttgcttcacacgtgtaaatatccctccccattcttctcttcccctctcttccctttcctctctccccctcggtgaatgatggctgcttctaaaacaaatacaaccaaaactcagcagtgtgatctatagcaggatggcccagtacctggctccactgatcacctctctcctgtgaccatcaccaacgggtgcctcttggcctggctttcccttggccttcctcagcttcaccttgatactgggcctcttccttgtcatgtctgaagctgtggaccaragacctggacttttgtctgcttaagggaaatgagggaagtaaagacagtgaaggggtggagggttgatcagggcacagtggacagggagacctcacaraaaaaggcctggaaggkgatttcccgtgtgactcatggrtaggawacaaaatgtgttccatgtaccattaatcttgacatatgccatgcataaaracttcctattaaaataagctttggragagatt

SEQ ID NO: 32 - protein, 967 aa, Homo Sapiens [sequence omitted]

SEQ ID NO: 33 - DNA, 1342 bp, Homo Sapiens
  CDS (179)...(1180)
gctaaaacaaaatacaacatttcttaaatacactgtttccagaaaggagctattctaacagaagcaactcaaagatatcccttctacagaagaggaagggctgaaaaatgctcatctctcacacagacttttgctggccaggaggttttaagtatcatgcctaccaacaagctgtaaaatgatcaccctgaacaatcaagatcaacctgtcccttttaacagctcacatccagatgaatacaaaattgcagcccttgtcttctatagctgtatcttcataattggattatttgttaacatcactgcattatgggttttcagttgtaccaccaagaagagaaccacggtaaccatctatatgatgaatgtggcattagtggacttgatatttataatgactttaccctttccgaatgtttttattatgcaaaagatgaatggccatttggagagtacttctgccagattcttggagctctcacagggttttacccaagcattgctttatggctttttgcctttattagtgctgacagatacatggccattgtacagccgaagtaccgccaaagaacttaaaaacacgtgcaaagccgtgctggcgtgtgtgggaagttcttggataatgaccctgaccacgaccacccctctgctactgctctataaagacccagataaagactccactcccgccacctgcctcaagatttctgacatcatctatctaaaagctgtgaacgtgctgaacctcactcgactgacattttttttcttgattcctttgttcatcatgattgggtgctacttggtcattattcataatctccttcacggcaggacgtctaagctgaaacccaaagtcaaggagaagtccataaggatcatcatcacgctgctggtgcaggtgctcgtctgctttatgcccttccacatctgtttcgctttcctgatgctgggaacgggggagaacagttacaatccctggggagcctttaccaccttcctcatgaacctcagcacgtgtctggatgtgattctctactacatcgtttcaaaacaatttcaggctcgagtcattagtgtcatgctataccgtaattaccttcgaagcatgcgcagaaaaagtttccgatctggtagtctacggtcactaagcaatataaacagtgaaatgttatgaataataaggttctttcatttcaatcccatcaaaattcacttcactaactactctggcgtcaatggatattctgtataatactatcaagtcccttttctcttgaaaaaataaattcattatcttcattttaaaaacttaaaaaaaaaaaaaaaaaaaaaaaaa

SEQ ID NO: 34 - protein, 333 aa, Homo Sapiens [sequence omitted]

SEQ ID NO: 35 - DNA, 1832 bp, Homo Sapiens
  CDS (192)...(1322)
  misc_feature (1)...(1832): n = A,T,C or G
gccgagcgcggcggccagagcggggccgcggaggcgacgccggggacgcccgcgcgacgagcaggtggcggcggctgcaggcttgtccagccggaagccctgagggcagctgttcccactggctctgctgaccttgtgccttggacggctgtcctcagcgaggggccgtgcacccgctcctgagcagcgccatgggcctgctggccttcctgaagacccagttcgtgctgcacctgctggtcggctttgtcttcgtggtgagtggtctggtcatcaacttcgtccagctgtgcacgctggcgctctggccggtcagcaagcagctctaccgccgcctcaactgccgcctcgcctactcactctggagccaactggtcatgctgctggagtggtggtcctgcacggagtgtacactgttcacggaccaggccacggtagagcgctttgggaaggagcacgcagtcatcatcctcaaccacaacttcgagatcgacttcctctgtgggtggaccatgtgtgagcgcttcggagtgctggggagctccaaggtcctcgctaagaaagagctgctctacgtgcccctcatcggctggacgtggtactttctggagattgtgttctgcaagcggaagtggaaggaggaccgggacaccgtggtcgaagggctgaggcgcctgtcggactaccccgagtacatgtggtttctcctgtactgcgaggggacgcgcttcacggagaccaagcaccgcgttagcatggaggtggcggctgctaaggggcttcctgtcctcaagtaccacctgctgccgcggaccaagggcttcaccaccgcagtcaagtgcctccgggggacagtcgcagctgtctatgatgtaaccctgaacttcagaggaaacaagaacccgtccctgctggggatcctctacgggaagaagtacgaggcggacatgtgcgtgaggagatttcctctggaagacatcccgctggatgaaaaggaagcagctcagtggcttcataaactgtaccaggagaaggacgcgctccaggagatatataatcagaagggcatgtttccaggggagcagtttaagcctgcccggaggccgtggaccctcctgaacttcctgtcctgggccaccattctcctgtctcccctcttcagttttgtcttgggcgtctttgccagcggatcacctctcctgatcctgactttcttggggtttgtgggagcagcttcctttggagttcgcagactgataggagtaactgagatagaaaaaggctccagctacggaaaccaagagtttaagaaaaaggaataattaatggctgtgactgaacacacgcggccctgacggtggtatccagttaactcaaaaccaacacacagagtgcaggaaaagacaattagaaactatttttcttattaactggtgactaatattaacaaaacttgagccaagagtaaagaattcagaaggcctgtcaggtgaagtcttcaacctcccacangcgcagggtcccagcatytycacgcgcscccgtgggaaggtgggntccggccggaraggccttccgcggacgccgtytttycagaacttcsgtttcmaaraggragcctttggytgytttytttccttaaacttaaawcaaattttttggtttttaatcaagttatyttkgggaacttaacctggcccctyacctyttytgcaccccccgcccccgaaactgtctcgtaatgaatttctgctgtcctnctgggagtggacggccgggtcccgtcccccgggagcatcgctcggntaacaccttggcttccagtgggggcc

SEQ ID NO: 36 - protein, 376 aa, Homo Sapiens
MGLLAFLKTQFVLHLLVGFVFVVSGLVINFVQLCTLALWPVSKQLYRRLNCRLAYSLWSQLVMLLEWWSCTECTLFTDQATVERFGKEHAVIILNHNFEIDFLCGWTMCERFGVLGSSKVLAKKELLYVPLIGWTWYFLEIVFCKRKWKEDRDTVVEGLRRLSDYPEYMWFLLYCEGTRFTETKHRVSMEVAAAKGLPVLKYHLLPRTKGFTTAVKCLRGTVAAVYDVTLNFRGNKNPSLLGILYGKKYEADMCVRRFPLEDIPLDEKEAAQWLHKLYQEKDALQEIYNQKGMFPGEQFKPARRPWTLLNFLSWATILLSPLFSFVLGVFASGSPLLILTFLGFVGAASFGVRRLIGVTEIEKGSSYGNQEFKKKE

SEQ ID NO: 37 - DNA, 931 bp, Homo Sapiens
  CDS (53)...(673)
ttgctttcctctgccgcatggtcctgggccgttggcgtcggaagcctgaagcatgggcgctgagtgggagctgggggccgaggctggcggttcgctgctgctgtgcgccgcgctgctggcggcgggctgcgccctgggcctgcgcctgggccgcgggcagggggcggcggaccgcggggcgctcatctggctctgctacgacgcgctggtgcacttcgcgctggaaggcccttttgtctacttgtctttagtaggaaacgttgcaaattccgatggcttgattgcttctttatggaaagaatatggcaaagctgatgcaagatgggtttattttgatccaaccattgtgtctgtggaaattctgaccgtcgccctggatgggtctctggcattgttcctcatttatgccatagtcaaagaaaaatattaccggcatttcctgcagatcaccctgtgcgtgtgcgagctgtatggctgctggatgaccttcctcccagagtggctcaccagaagccccaacctcaacaccagcaactggctgtactgttggctttacctgtttttttttaacggtgtgtgggttctgatcccaggactgctactgtggcagtcatggctagaactcaagaaaatgcatcagaaagaaaccagttcagtgaagaagtttcagtgaactttcaaaaccataaacaccattatctaacttcatgaaccagaatgaatcaaatctttttgtttggccaaaatgtaatacattccagtctacactttgtttttgtattgttgctcctgaacaacctgtttcaaattggttttaaggcgaccagttttcgttgtattgttgttcaattaaatggtgatatagggaaaagagaacaaatttgaatttgtaataataaaatgtttaattatacaaaaaaaaaaaaaaaaa

SEQ ID NO: 38 - protein, 206 aa, Homo Sapiens
MGAEWELGAEAGGSLLLCAALLAAGCALGLRLGRGQGAADRGALIWLCYDALVHFALEGPFVYLSLVGNVANSDGLIASLWKEYGKADARWVYFDPTIVSVEILTVALDGSLALFLIYAIVKEKYYRHFLQITLCVCELYGCWMTFLPEWLTRSPNLNTSNWLYCWLYLFFFNGVWVLIPGLLLWQSWLELKKMHQKETSSVKKFQ

SEQ ID NO: 39 - DNA, 2590 bp, Homo Sapiens
  CDS (11)...(1489)
tcggcggaagatggcggccggcgaaaggagctggtgcctgtgcaagttgttgaggtttttttattcattattcttccctgggctcattgtatgtggaactttatgtgtgtgtttggtcattgtcctttggggaatcagactgctgctacagagaaagaaaaaattagtgtcaactagcaaaaatgggaaaaatcaaatggtgattgcattttttcatccatactgcaatgctggtggaggaggagaaagagttttatggtgtgctttaagagccctgcagaaaaagtatcctgaagcagtttatgttgtttataccggcgatgttaatgtcaacggtcaacagatactagaaggtgctttcagaagatttaacatcagattaattcacccagtgcagtttgtttttttaaggaaacgctatcttgtggaagattcactgtatcctcacttcacactgctgggccaaagtctaggatccatttttcttggctgggaagctctaatgcagtgtgttcctgatgtttacattgattcaatgggatacgcttttacgcttcctctgtttaagtatatagggggttgccaagttggaagctatgttcattatcctactatcagcaccgacatgctctctgtagtgaagaatcaaaatattggatttaataatgcagccttcattaccaggaatccttttctcagcaaagtaaagctcatctactactatttatttgcttttatttatggacttgttggttcttgcagtgatgtagtcatggtcaattcttcttggacactaaaccatattctctcactatggaaagttgggaattgcactaacattgtttatccaccttgtgatgtgcagacatttctggacattcccttacatgagaaaaagatgaccccaggacatttgctggtttctgttggccagtttaggccggaaaagaatcatccattgcagatcagagcctttgctaaattgctgaataagaagatggttgagtcacctccttcgcttaaacttgtcctcattggaggttgtcgtaacaaagatgatgaacttagggtaaaccaactgagaaggctgtctgaggatttaggagttcaagaatatgtggaatttaaaataaacattccatttgatgaattaaagaattatttgtctgaagcaacaattggtctgcataccatgtggaacgagcattttgggattggagttgtggagtgtatggcagctggcacaattatccttgcacacaattcggggggcccaaagcttgacattgtggttcctcacgaaggagatataactggctttctggctgagagtgaagaagactatgctgaaactatcgctcacattctttccatgtctgcagaaaagagactccaaatcagaaaaagtgctcgtgcatctgtaagcagattctctgatcaggaatttgaagtgacattcctatcatctgtggaaaagttatttaagtaatgccatatctgtaaaattaaagatattttatataaactggttaaacaccttcatatgtaaatatttttctaaattcaatctcatttgtcaaatcattttactttagaaaacagacaaaatttccttttagaataaaaggaagtgttgaaaagaaaatggatgactagccttcggcttccattcttggtatacatgagagaggctggctgctgagatgaatgtgaaccaggttgcagagaatctggctttgagccaccaggaagaactagtggatttgccaaaaaactaccccttgagtgaaaatgaagatgagggggacagtgatggagagagaaagcatcaaaagcttctggaagcaatcatttcccttgatggaaagaataggcggaaattggctgagaggtctgaggctagtctgaaagtgtcagagttcagtgtcagttctgaaggatcaggagaaaagctgggccttgcagatctgcttgagcccgttaaaacttcatcttctttggccactgtaaaaaagcaactgaatagagtcaaatcaaagaaggtggtggagttacctcttaacaaagaaaaaattgaacagatccacagagaagtagcattcagtaaaacctcacaggtcctctccaaatgggaccctatcatcctgaagaaccagcaggcagagcagctggtttttcccctggggaaggagcagccagccattgctcccattgaacatgcgctcagtggctggaaggcaagaactcccctggagcaggaaatttttaacctcctccataagaacaagcagccagtgacagatcctttactgactcccatggaaaaggcctctctccaagccatgagcctggaagaggcaaagatgcaccgagcagagcttcagagggctcgggctctgcagtcctactatgaggccaaggctcgaaaagagaagaaaatcaaaagtaaaaagtatcacaaagtcgtgaagaaaggaaaggccaagaaagccttaaaagagtttgagcagctacagaaggttaatccaactgtggcactggaaaaaaaaaaaaaaaaaaaaaaaaaaaaaaaaaaaaaaaaaaaaaaaaa

SEQ ID NO: 40 - protein, 492 aa, Homo Sapiens
MAAGERSWCLCKLLRFFYSLFFPGLIVCGTLCVCLVIVLWGIRLLLQRKKKLVSTSKNGKNQMVIAFFHPYCNAGGGGERVLWCALRALQKKYPEAVYVVYTGDVNVNGQQILEGAFRRFNIRLIHPVQFVFLRKRYLVEDSLYPHFTLLGQSLGSIFLGWEALMQCVPDVYIDSMGYAFTLPLFKYIGGCQVGSYVHYPTISTDMLSVVKNQNIGFNNAAFITRNPFLSKVKLIYYYLFAFIYGLVGSCSDVVMVNSSWTLNHILSLWKVGNCTNIVYPPCDVQTFLDIPLHEKKMTPGHLLVSVGQFRPEKNHPLQIRAFAKLLNKKMVESPPSLKLVLIGGCRNKDDELRVNQLRRLSEDLGVQEYVEFKINIPFDELKNYLSEATIGLHTMWNEHFGIGVVECMAAGTIILAHNSGGPKLDIVVPHEGDITGFLAESEEDYAETIAHILSMSAEKRLQIRKSARASVSRFSDQEFEVTFLSSVEKLFK

SEQ ID NO: 41 - DNA, 3337 bp, Homo Sapiens
  CDS (99)...(1661)
gtcgagcctctagcccgcccgggtttccttcgcagtcgcgcaccgacgctcaaacgcgcgctccaacccgcagcctcctcctgcctcaccgcccgaagatggcggctctcaaactcctctcctccgggcttcggctctgcgcctctgcccgcggatctggggcaacctggtacaagggatgtgtttgttccttttccaccagtgctcatcgccataccaagttttatacagatccagtagaagctgtaaaagacatccctgatggtgccacggttttggttggtggttttgggctatgtggaattccagagaatcttatagatgctttactgaaaactggagtaaaaggactaactgcagtcagcaacaatgcaggggttgacaattttggtttggggcttttgcttcggtcgaagcagataaaacgcatggtctcttcatatgtgggagaaaatgcagaatttgaacgacagtacttatctggtgaattagaagtggagctgacaccacagggcacacttgcagagaggatccgtgcaggcggggctggagttcctgcattttacaccccaacagggtatgggaccctggtacaagaaggaggatcgcccatcaaatacaacaaagatggcagtgttgccattgccagtaagccaagagaggtgagggagttcaatggtcagcactttattttggaggaagcaattacaggggattttgctttggtgaaagcctggaaggcggaccgagcaggaaacgtgattttcaggaaaagtgcaaggaatttcaacttgccaatgtgcaaagctgcagaaaccacagtggtagaggttgaagaaattgtggatattggagcatttgctccagaagacatccatattcctcagatttatgtacatcgccttataaagggagaaaaatatgagaaaagaattgagcgtttatcaatccggaaagagggagatggggaagccaaatctgctaaacctggagatgacgtaagggaacgaatcatcaagagggccgctcttgagtttgaggatggcatgtatgctaatttgggcataggaatccctctcctggccagcaattttatcagcccaaatataactgttcatcttcaaagtgaaaatggagttctgggtttgggtccatatccacgacaacatgaagctgatgcagatctcatcaatgcaggcaaggaaacagttactattcttccaggagcctcttttttctccagcgatgaatcatttgcaatgattagaggtggacacgtcgatctgacaatgctaggagcgatgcaggtttccaaatatggtgacctggctaactggatgatacctgggaagatggtgaaaggaatgggaggtgctatggatttagtgtccagtgcgaaaaccaaagtggtggtcaccatggagcattctgcaaagggaaatgcacataaaatcatggagaaatgtacattaccattgactggaaagcaatgtgtcaaccgcattattactgaaaaggctgtgtttgatgtggacaagaagaaagggttgactctgattgagctctgggaaggcctgacagtggatgacgtacaaaagagtactgggtgtgattttgcagtttcaccaaaactcatgccaatgcagcagatcgcaaattgaaatatggatatttgtaccaggctgcgtgtttttcattttaaacacacaagatttaattgaaaggacatcaataatcataattgtgtatttaacaggtggttttttattagttttcttgtgtttcagactttatgcagccatataaactgttctctaggcatgctgtgacattttaataaaaagcaaaaggagcatttataattatctcatttgttaaggctgagaaggttgtttttataataggtaattatattgaatgcattttcactgaatatggtatgtatgctaaattatatgaacctttccccaagaagggccctagaaattgatgtggctttcctcttaaatattaattattagtcctgaaagaaagataacatatgtgatttttgtggttaggagagttgctgtcatgattgttttttcttcagcctcctctgacttttcttttggggcttcagattttatgattacatcttgtccccctagaacatcccccttcctcccatactgcttttaaacagatgcccaagaaggcaagcaggaatgcctcttgtgggggagggcagggagaaataactagttcaaaccaactatctatctatgctttgcaaagactaaggcgtattataggaagagggctagaaacctaactgattcttctcagttttctcattttaaaacagcccagtattcctttgtatcctcaagggtccttgagaatacttctgttattgaaaccctgtgggctacttgtactgtacctcctctcaagccaagaagggctgtgggataatttaccatgaatccttagtagcaatgacagcagagttaaaaaataaaaggtgttttactttcaggctcttgttttggttcagaggagattttaaatattgaatgacacttctacagaacaacggtttttcttctgccaaggctacttcctttaacgaagtgcctttaattcagccttatccaactagggaaaataatgttggacaagtctaggatttgaagagtcagtgaacttttagtgtcagggaataaacatggtgggtagattaggtttgaaaaaaacttccttagaggtatttattctcaatacctgacaggggcccatgggaatgacttcagaagcatcccggataatagatgggtaaaaagtctaggcaccctgaagaacaggtgagacagctggcctctggacagaggtaggcatagtacagtacgatatatcattcctctggtcctaaatatacaaacttattcatgtttttaggtgatgatggtcattgaaactcacttcttttcaggtgtagctacaattgtgtaatgtacaatattagagaaaggacaggctttttatgagtaacacacaccatatataaaacagcctttctggctgaccacatggttaaatgcataccttcccagtactggggggaaaatgacccttcttagaatgtgcaagttccatagagtaatatattgatatgattttgaaaagaattgttgatagttacatcttcaaacttatcattccagtatgcatctttaagataatgtgattctaagtagatgactttatattcttgattaaagagtgctatacatgttaagaaatgcattaaggaatacaataaatattctaaactgatgaaaaaaaaaaaaaaaaa

SEQ ID NO: 42 - protein, 520 aa, Homo Sapiens
MAALKLLSSGLRLCASARGSGATWYKGCVCSFSTSAHRHTKFYTDPVEAVKDIPDGATVLVGGFGLCGIPENLIDALLKTGVKGLTAVSNNAGVDNFGLGLLLRSKQIKRMVSSYVGENAEFERQYLSGELEVELTPQGTLAERIRAGGAGVPAFYTPTGYGTLVQEGGSPIKYNKDGSVAIASKPREVREFNGQHFILEEAITGDFALVKAWKADRAGNVIFRKSARNFNLPMCKAAETTVVEVEEIVDIGAFAPEDIHIPQIYVHRLIKGEKYEKRIERLSIRKEGDGEAKSAKPGDDVRERIIKRAALEFEDGMYANLGIGIPLLASNFISPNITVHLQSENGVLGLGPYPRQHEADADLINAGKETVTILPGASFFSSDESFAMIRGGHVDLTMLGAMQVSKYGDLANWMIPGKMVKGMGGAMDLVSSAKTKVVVTMEHSAKGNAHKIMEKCTLPLTGKQCVNRIITEKAVFDVDKKKGLTLIELWEGLTVDDVQKSTGCDFAVSPKLMPMQQIAN

SEQ ID NO: 43 - DNA, 1864 bp, Homo Sapiens
  CDS (67)...(1518)
ggcacgagggccggaagcgcggatcacacgggcccctacaaggggcccctacaagcggccacaaggatggcaggcttcgcggagctcgggctgtcatcgtggctcgtggaacaatgtcggcagctgggtttgaagcagcccacgcccgtgcagctcggctgcatccccgccatcctggagggtcgagactgcttgggctgtgctaagacaggcagtgggaagacagcagcgtttgtccttcccatcttgcagaagctgtctgaggatccctatggcatcttctgcctcgtcctgacacccaccagggagctggcctaccagatcgcagagcagttccgggtcctggggaagcctctagggctgaaagactgcatcatcgtcggtggcatggacatggtggcccaggcgctggagctctctcggaaaccacacgtggtcatcgccacgccggggcgcctggcagatcacctgcgcagctccaacacttttagtataaagaagatccgcttcctggtgatggatgaggcagaccggctgctggaacagggctgcactgacttcaccgtggacctggaggccatcctggcggctgtgccggcccgcaggcagacactgctgttcagcgccacgctgaccgacacactccgggagctgcagggtctggccaccaaccagcccttcttctgggaagcacaggccccggtgagcaccgtggagcagctggaccagcgctacctgctggtgcctgagaaggtcaaggacgcctacctggtccacctgatccagcgcttccaggatgagcacgaggactggtccattatcatcttcaccaacacgtgcaagacctgccagattctgtgcatgatgctgcgcaaattcagcttccccaccgtggctctgcactccatgatgaagcagaaagaacgctttgccgccctagccaagttcaagtccagcatctaccggatcctgatcgcaacagacgtggcctcccggggcctggacatccctacggtacaggtggtcatcaaccacaacacccccgggctccccaagatctacatccaccgagtcggccggacggcccgtgcagggcggcagggtcaggccatcacgctggtgacacagtacgacatccacctggtgcacgccatcgaggagcagatcaagaagaagctggaggagttctccgtggaagaggccgaggtgctacagatcctcacacaggtcaacgtggtgcgaagagagtgtgagatcaaactggaggcggcccactttgacgaaaagaaggagatcaacaaacggaagcagctgatcctggaggggaaggaccctgacctggaggccaagcgcaaggctgagctggccaagatcaagcagaagaaccggcgcttcaaggagaaggtggaggagacgctgaagcgacagaaggctggcagggctggccacaaggggcgtccacccaggacaccgtctgggtcccactcaggcccagtcccctcccagggcctggtctgagccccacacggccatctgcccagtccttgactcgtccatggagctgagggtcggaggaaccttccttgggggcagcagcccttcccgggggcctacccagtgccccacagcagaacccgtgggcgctcgtgttgtgcgggccctgctcctctgccccgaaaccactggctggccccttccctgagccctggccaagattcaggctgcaggggaagaaagaacatgaccgggaggttgtgaccccaacccaaggtcaccccccaggggtgccgcatacaggaggtgcttaataaacgggtcttttgacttccaaaaaaaaaaaaaaaaaaaaaaaaaaaaaaaaaaa

SEQ ID NO: 44 - protein, 483 aa, Homo Sapiens
MAGFAELGLSSWLVEQCRQLGLKQPTPVQLGCIPAILEGRDCLGCAKTGSGKTAAFVLPILQKLSEDPYGIFCLVLTPTRELAYQIAEQFRVLGKPLGLKDCIIVGGMDMVAQALELSRKPHVVIATPGRLADHLRSSNTFSIKKIRFLVMDEADRLLEQGCTDFTVDLEAILAAVPARRQTLLFSATLTDTLRELQGLATNQPFFWEAQAPVSTVEQLDQRYLLVPEKVKDAYLVHLIQRFQDEHEDWSIIIFTNTCKTCQILCMMLRKFSFPTVALHSMMKQKERFAALAKFKSSIYRILIATDVASRGLDIPTVQVVINHNTPGLPKIYIHRVGRTARAGRQGQAITLVTQYDIHLVHAIEEQIKKKLEEFSVEEAEVLQILTQVNVVRRECEIKLEAAHFDEKKEINKRKQLILEGKDPDLEAKRKAELAKIKQKNRRFKEKVEETLKRQKAGRAGHKGRPPRTPSGSHSGPVPSQGLV

SEQ ID NO: 45 - DNA, 1971 bp, Homo Sapiens
  CDS (16)...(1527)
cgcgcctgagccgccatgtcggaggcgcgtggagagccagggtccgggcctgaggctggcgcccgattcttctgcactgcgggtcgcggcctggagccgttcgtaatgcgagaggtgcgggcgcggctggcggccacgcaggttgaatatatttcaggaaaggtttttttcaccacctgttctgatttgaatatgttgaagaaattaaaatctgcagaaagattatttttgctgattaaaaagcagtttccacttattatttcttctgtaagtaaaggaaaaatatttaatgaaatgcaaagacttataaatgaagatccaggaagttggttgaatgccatttcaatttggaaaaatcttcttgaacttgatgcaaaaaaggaaaaactttctcagagagatgataaccaactaaaaagaaaagtgggagaaaatgaaatcattgcaaagaaattaaaaatagaacaaatgcaaaagatagaagagaatagggactgccagctggaaaaacaaataaaagaagaaactctggagcaaagagattttaccactaaaagcgaaaagtttcaagaagaagaatttcagaatgacatagagaaagcaattgatactcataatcagaatgacttgactttcagagtatcttgtcgctgcagtggaactattggaaaggccttcactgcacaggaggtaggaaaagtaattggaattgctattatgaaacactttggatggaaagcagacttgaggaatccacaattagagatctttatacatctaaatgacatttactctgtggtggggattcctgtgttcagggtttccctagccagcagagcttacatcaagacagctggactgcgatctacaatagcgtgggcaatggcatctctggctgacattaaggctggtgcatttgttttagatccaatgtgtggacttggaacaatacttttggaagctgctaaagaatggccagatgtgtattatgtaggtgctgatgtcagcgactcacagttactaggtacttgggacaatctgaaagctgcaggccttgaggataaaattgaattacttaaaatctctgttatagaattgccattgccttcagaaagtgttgatattattatttctgacattccatttgggaaaaagtttaagttaggaaaagacatcaaaagcattctacaagaaatggaaagagtgcttcatgttggcggaaccattgtattgttgcttagtgaagatcaccacaggcgccttacagattgtaaagagagcaacatccctttcaattccaaggacagtcacacagatgaacctggaattaaaaagtgcttgaatcctgaagaaaaaactggtgcattcaagacagcgtcaacttcattcgaagccagtaaccacaaattcttagacagaatgtcaccatttggctccttggtaccagtggaatgctacaaagttagccttggaaagacagatgcgttcatatgtaaatataagaagtcgcactcttctggactgtagcaggcttgctgccatcagccgggttcaggcccttgtaagttagctgtacagcagaagtttgctgtctctaggattcatatagcacccacagagctccaagtaaccaaattcccccaaagacaggaggtgtggctgatgggtacacatgcttggtaagagtttctgctttatattctaaagtacttaatgtttttgagaaaaaagttaccgaatattttttagacttaagttttatcttctgtcagaatgtgaaaagttctgcccagtttctgagcaaaaacttcaatttcaaaataaaggttttcaggggttcacttaagtgtatcacaatcaacaccagacgggatattttaactatcagattttcggaaatgtaaaaacctttatgtgtaacttcttttgatattaaacttgatttttgagcctgtaaaaaaaaaaaaaaaa

SEQ ID NO: 46 - protein, 503 aa, Homo Sapiens
MSEARGEPGSGPEAGARFFCTAGRGLEPFVMREVRARLAATQVEYISGKVFFTTCSDLNMLKKLKSAERLFLLIKKQFPLIISSVSKGKIFNEMQRLINEDPGSWLNAISIWKNLLELDAKKEKLSQRDDNQLKRKVGENEIIAKKLKIEQMQKIEENRDCQLEKQIKEETLEQRDFTTKSEKFQEEEFQNDIEKAIDTHNQNDLTFRVSCRCSGTIGKAFTAQEVGKVIGIAIMKHFGWKADLRNPQLEIFIHLNDIYSVVGIPVFRVSLASRAYIKTAGLRSTIAWAMASLADIKAGAFVLDPMCGLGTILLEAAKEWPDVYYVGADVSDSQLLGTWDNLKAAGLEDKIELLKISVIELPLPSESVDIIISDIPFGKKFKLGKDIKSILQEMERVLHVGGTIVLLLSEDHHRRLTDCKESNIPFNSKDSHTDEPGIKKCLNPEEKTGAFKTASTSFEASNHKFLDRMSPFGSLVPVECYKVSLGKTDAFICKYKKSHSSGL

SEQ ID NO: 47 - DNA, 2800 bp, Homo Sapiens
  CDS (24)...(2726)
atcagcgagggattcacggcgaaatgagactgttcgtgagtgatggcgtcccgggttgcttgccggtgctggccgccgccgggagagcccggggcagagcagaggtgctcatcagcactgtaggcccggaagattgtgtggtcccgttcctgacccggcctaaggtccctgtcttgcagctggatagcggcaactacctcttctccactagtgcaatctgccgatatttttttttgttatctggctgggagcaagatgacctcactaaccagtggctggaatgggaagcgacagagctgcagccagctttgtctgctgccctgtactatttagtggtccaaggcaagaagggggaagatgttcttggttcagtgcggagagccctgactcacattgaccacagcttgagtcgtcagaactgtcctttcctggctggggagacagaatctctagccgacattgttttgtggggagccctatacccattactgcaagatcccgcctacctccctgaggagctgagtgccctgcacagctggttccagacactgagtacccaggaaccatgtcagcgagctgcagagactgtactgaaacagcaaggtgtcctggctctccggccttacctccaaaagcagccccagcccagccccgctgagggaagggctgtcaccaatgagcctgaggaggaggagctggctaccctatctgaggaggagattgctatggctgttactgcttgggagaagggcctagaaagtttgcccccgctgcggccccagcagaatccagtgttgcctgtggctggagaaaggaatgtgctcatcaccagtgccctcccttacgtcaacaatgtcccccaccttgggaacatcattggttgtgtgctcagtgccgatgtctttgccaggtactctcgcctccgccagtggaacaccctctatctgtgtgggacagatgagtatggtacagcaacagagaccaaggctctggaggagggactaaccccccaggagatctgcgacaagtaccacatcatccatgctgacatctaccgctggtttaacatttcgtttgatatttttggtcgcaccaccactccacagcagaccaaaatcacccaggacattttccagcagttgctgaaacgaggttttgtgctgcaagatactgtggagcaactgcgatgtgagcactgtgctcgcttcctggctgaccgcttcgtggagggcgtgtgtcccttctgtggctatgaggaggctcggggtgaccagtgtgacaagtgtggcaagctcatcaatgctgtcgagcttaagaagcctcagtgtaaagtctgccgatcatgccctgtggtgcagtcgagccagcacctgtttctggacctgcctaagctggagaagcgactggaggagtggttggggaggacattgcctggcagtgactggacacccaatgcccagtttatcacccgttcttggcttcgggatggcctcaagccacgctgcataacccgagacctcaaatggggaacccctgtacccttagaaggttttgaagacaaggtattctatgtctggtttgatgccactattggctatctgtccatcacagccaactacacagaccagtgggagagatggtggaagaacccagagcaagtggacctgtatcagttcatggccaaagacaatgttcctttccatagcttagtctttccttgctcagccctaggagctgaggataactataccttggtcagccacctcattgctacagagtacctgaactatgaggatgggaaattctctaagagccgcggtgtgggagtgtttggggacatggcccaggacacggggatccctgctgacatctggcgcttctatctgctgtacattcggcctgagggccaggacagtgctttctcctggacggacctgctgctgaagaataattctgagctgcttaacaacctgggcaacttcatcaacagagctgggatgtttgtgtctaagttctttgggggctatgtgcctgagatggtgctcacccctgatgatcagcgcctgctggcccatgtcaccctggagctccagcactatcaccagctacttgagaaggttcggatccgggatgccttgcgcagtatcctcaccatatctcgacatggcaaccaatatattcaggtgaatgagccctggaagcggattaaaggcagtgaggctgacaggcaacgggcaggaacagtgactggcttggcagtgaatatagctgccttgctctctgtcatgcttcagccttacatgcccacggttagtgccacaatccaggcccagctgcagctcccacctccagcctgcagtatcctgctgacaaacttcctgtgtaccttaccagcaggacaccagattggcacagtcagtcccttgttccaaaaattggaaaatgaccagattgaaagtttaaggcagcgctttggagggggccaggcaaaaacgtccccgaagccagcagttgtagagactgttacaacagccaagccacagcagatacaagcgctgatggatgaagtgacaaaacaaggaaacattgtccgagaactgaaagcacaaaaggcagacaagaacgaggttgctgcggaggtggcgaaactcttggatctaaagaaacagttggctgtagctgaggggaaaccccctgaagcccctaaaggcaagaagaaaaagtaaaagaccttggctcatagaaagtcactttaatagatagggacagtaataaataaatgtacaatctctataaaaaa

SEQ ID NO: 48 - protein, 900 aa, Homo Sapiens
MRLFVSDGVPGCLPVLAAAGRARGRAEVLISTVGPEDCVVPFLTRPKVPVLQLDSGNYLFSTSAICRYFFLLSGWEQDDLTNQWLEWEATELQPALSAALYYLVVQGKKGEDVLGSVRRALTHIDHSLSRQNCPFLAGETESLADIVLWGALYPLLQDPAYLPEELSALHSWFQTLSTQEPCQRAAETVLKQQGVLALRPYLQKQPQPSPAEGRAVTNEPEEEELATLSEEEIAMAVTAWEKGLESLPPLRPQQNPVLPVAGERNVLITSALPYVNNVPHLGNIIGCVLSADVFARYSRLRQWNTLYLCGTDEYGTATETKALEEGLTPQEICDKYHIIHADIYRWFNISFDIFGRTTTPQQTKITQDIFQQLLKRGFVLQDTVEQLRCEHCARFLADRFVEGVCPFCGYEEARGDQCDKCGKLINAVELKKPQCKVCRSCPVVQSSQHLFLDLPKLEKRLEEWLGRTLPGSDWTPNAQFITRSWLRDGLKPRCITRDLKWGTPVPLEGFEDKVFYVWFDATIGYLSITANYTDQWERWWKNPEQVDLYQFMAKDNVPFHSLVFPCSALGAEDNYTLVSHLIATEYLNYEDGKFSKSRGVGVFGDMAQDTGIPADIWRFYLLYIRPEGQDSAFSWTDLLLKNNSELLNNLGNFINRAGMFVSKFFGGYVPEMVLTPDDQRLLAHVTLELQHYHQLLEKVRIRDALRSILTISRHGNQYIQVNEPWKRIKGSEADRQRAGTVTGLAVNIAALLSVMLQPYMPTVSATIQAQLQLPPPACSILLTNFLCTLPAGHQIGTVSPLFQKLENDQIESLRQRFGGGQAKTSPKPAVVETVTTAKPQQIQALMDEVTKQGNIVRELKAQKADKNEVAAEVAKLLDLKKQLAVAEGKPPEAPKGKKKK

SEQ ID NO: 49 - DNA, 6586 bp, Homo Sapiens
  CDS (440)...(5386)
ctggggagccggcgctggaggtggtgagtggcgtggggactgtgtcgagggggtccccaaggtgccggaccctgcggaggggcgaagtttcggcactggggagggcgtgcggacgctttccctacaggcgaccactgctctgcgggcgggtggtcttagctccagtcccccattcagttcctcagcattccaggtcggcggcgaaggggtccccgaacgaagggcgcaaggcagcgtctctgctgggaccgggaagccggacttcagggcctctcggcccgtgggcttctccccgagtctccccgagtcggttggcattaagagtttagcagatactttcagaaatggatacataagaaatggctggaaatcaaatgaatgtccaaagaagagcttagggtcttagtaacattcttttttaaaataactgtctgccaaaatgtcattacacagtactcataatagaaataacagcggtgatattcttgatattccttcttcccaaaatagttcatcactgaatgccctcacccacagtagccgacttaagctgcatttgaagtcggatatgtcagaatgtgaaaatgatgatccattattgagatctgcaggtaaagtcagagacataaatagaacttatgttatttctgccagtagaaaaacagcagacatgccccttacccctaatcctgtaggtagattggcacttcagaggagaactacaaggaacaaagaatcatctttgcttgttagtgagttggaagacacaactgaaaaaacagcagaaacacgtcttacattacaacgtcgtgctaaaacagattctgcagaaaagtggaaaacagctgaaatagattctgtcaaaatgacactgaatgtgggaggtgaaacagaaaataatggtgtttctaaggaaagtagaacaaatgtaaggattgtaaataatgctaaaaactcttttgttgcctcttctgtacctttagatgaagatccacaggtcattgaaatgatggctgataagaaatacaaagaaacattttctgcccccagtagagcaaatgaaaatgttgcacttaagtactcaagtaatagaccacccattgcttccctgagtcagactgaagttgttagatcaggacacttgacaacgaaacctactcagagcaagttggatatcaaagtgttgggaacaggaaacttgtatcatagaagtattgggaaggaaattgcaaaaacttcaaataaatttgggagcttagaaaaaagaacacctacaaaatgtacaacagaacacaaactgacaacaaagtgcagcctgcctcagcttaagagcccagctccatcaatactgaagaatagaatgtctaaccttcaagttaaacaaagaccaaaaagttcctttcttgcaaataaacaggaaagatccgcagaaaatacaattcttcccgaagaagaaactgtagttcagaacacctctgcaggaaaagaccccttaaaagtagagaatagtcaagtgacagtggcagtacgcgtaagacctttcaccaagagagagaagattgaaaaagcatcccaggtagtcttcatgagtgggaaagaaataactgtggaacaccctgacacgaaacaagtttataattttatttatgatgtttcattctggtcttttgatgaatgtcatcctcactacgctagccagacaactgtctatgagaagctagcagcaccactcctagaaagagccttcgaaggcttcaatacctgtctttttgcttatggtcagactggctctggaaaatcatatacgatgatgggatttagtgaagaaccaggaataattccaagattttgtgaagatcttttttctcaagtagccagaaaacaaacccaagaggtcagctatcacattgaaatgagcttctttgaagtatataatgaaaaaattcacgaccttctggtttgtaaagatgaaaatgggcagagaaagcaaccactgagagtgagggaacatcctgtttatggaccatatgttgaagcactgtcaatgaacattgtcagttcttacgctgatatccagagttggctagaattgggaaataaacaaagagctactgctgctactggtatgaatgataaaagttcccgatctcattcagttttcaccctggtgatgacccagaccaagacagaatttgtggaaggggaagaacacgatcacagaataacaagtcgaattaacctaatagatctggcaggcagtgagcgctgctctacggctcacactaatggagatcgactaaaggaaggtgtgagtattaataagtccttgctaactttgggaaaagttatatctgcactttcggaacaagcaaaccaaaggagtgtttttattccttatcgtgaatctgttcttacatggctgttaaaagaaagtctgggtggaaattcaaaaactgcaatgattgctacgattagtcccgctgccagcaacatagaagaaacattaagcacacttagatatgctaaccaagcccgtttaatagtcaacattgctaaagtaaatgaagatatgaacgctaagttaattagagaattgaaggcagaaattgcaaagctaaaagctgctcagagaaacagtcggaatattgaccctgaacgatacaggctctgtcggcaagaaataacatccttaagaatgaaactgcatcaacaggagagagacatggcagaaatgcaaagagtgtggaaagaaaagtttgaacaagctgaaaaaagaaaacttcaagaaacaaaagagttacagaaagcaggaattatgtttcaaatggacaatcatttaccaaaccttgttaatctgaatgaagatccacaactatctgagatgctgctatatatgataaaagaaggaacaactacagttggaaagtataaaccaaactcaagccatgatattcagttatctggggtgctgattgctgatgatcattgtactatcaaaaattttggtgggacagtgagtattatcccagttggggaagcaaagacatatgtaaatggaaaacatattttggaaatcacagtattacgtcatggtgatcgagtgattcttggtggagatcattattttagatttaatcatccagtagaagtccagaaaggaaaaaggccatctggaagagatactcctataagtgagggtccaaaagactttgaatttgcaaaaaatgagttgctcatggcacagagatcacaacttgaagcagaaataaaagaggctcagttgaaggcaaaggaagaaatgatgcaaggaatccagattgcaaaagaaatggctcagcaagagctttcttctcaaaaagctgcatatgaaagcaaaataaaagcactggaagcagaactgagagaagagtctcaaaggaaaaaaatgcaggaaataaataaccagaaggctaatcacaaaattgaggaattagaaaaggcaaagcagcatcttgaacaggaaatatatgtcaacaaaaagcgattagaaatggagacattggctacaaaacaggctttagaagaccatagcatccgccatgcaagaattctggaagctttagaaactgaaaagcaaaaaattgctaaagaagtacaaattctacagcagaatcggaataatagggataaaacttttacagtgcagacaacttggagctctatgaaactctcaatgatgattcaggaagccaatgctatcagcagcaaattgaaaacatactatgtttttggcagacatgatatatcagataaaagtagttctgacacttctattcgggttcgtaacctgaaactaggaatctcaacattctggagtctggaaaagtttgaatctaaacttgcagcaatgaaagaactttatgagagtaatggtagtaacaggggtgaagatgccttttgtgatcctgaagatgaatgggaacccgacattacagatgcaccagtttcttcactttctagaaggaggagtaggagtttgatgaagaacagaagaatttctggttgtttacatgacatacaagtccatccaattaagaatttgcattcttcacattcatcaggtttaatggacaaatcaagcactatttactcaaattcagcagagtcctttcttcctggaatttgcaaagaattgattggttcttcgttagatttttttggacagagttatgatgaagaaagaactatagcagacagcctaattaatagttttcttaaaatttataatgggctatttgccatttccaaggctcatgaagaacaagatgaagaaagtcaagataacttgttttcttctgatcgagcaatccagtcacttactattcagactgcatgtgcttttgagcagctagtagtgctaatgaaacactggctgagtgatttactgccttgtaccaacatagcaagacttgaggatgagttgagacaagaagttaaaaaactgggaggctacttacagttatttttgcagggatgctgtttggatatttcatcaatgataaaagaggctcaaaagaatgcaatccaaattgtacaacaagctgtaaagtatgtggggcagttagcagttctgaaagggagcaagctacattttctagaaaacggtaacaataaagctgccagtgtccaggaggaattcatggatgctgtttgtgatggtgtaggcttaggaatgaagattttattagattctggactggaaaaagcaaaagaacttcagcatgaactctttaggcagtgtacaaaaaatgaggttaccaaagaaatgaaaactaatgccatgggattgattagatctcttgaaaacatctttgctgaatcgaaaattaaaagtttcagaaggcaagtacaagaagaaaactttgaataccaagatttcaagaggatggttaatcgtgctccagaattcttaaagttaaaacattgcttagagaaagctattgaaattattatttctgcactgaaaggatgccatagtgatataaatcttctccagacttgtgttgaaagtattcgcaacttggccagtgatttttacagtgacttcagtgtgccttctacttctgttggcagctatgagagtagagtaactcacattgtccaccaggaactagaatctctagctaagtctctcctcttttgttttgaatctgaagaaagccctgatttgttgaaaccctgggaaacttataatcaaaataccaaagaagaacaccaacaatctaaatcaagcgggattgacggcagtaagaataaaggtgtaccaaagcgtgtctatgagctccatggctcatccccagcagtgagctcagaggaatgcacacccagtaggattcagtgggtgtgaatactgatgtgtaggcacttttatgaccacccatgaaagaaaaagaacacttgctcggtaattttctttatgcaggagagtttaagagaaatcagcacagatatttcaaaaaagtccatgtctttttatctttaaaatatctatttatcaaaggccagacacagtggctcacgcctgtaatcccagcactttgggaggcgggcagatcacaaggtcaggagtttgagaccggcctggccaacatggtgaaaccccgtctctactaaaaatacaaaaatttgctgggcatggtggcgcgtgcctgtaatcccagctactaggggggctgaggcaggaggatcgcttgaacctgagaggcagaggttgcagtgagccaagatcatgccactttactccagtctgagcaacagaacgagacttagtcaaaataaataaataaataagtaaataaataaataaataaaatatcttttatctttaaagtgtttaacattggtatactgtctgtagttggttcattagtcgtttataaagggttattttctcatgagtggaaacctgaacaatcagttacctttgtgcctatgccttctctctcctcagacagctgggatgtttatggtgaaatggcctgtacaagtttaactaagacaacttaacttgcattgttaatcaaaaattcttttctcaaagggttaactggttgccattttgaatagtatgttcaagggtgtagcttcctgtttctttccaaattataagtagctacctaaatatagtataattatatattaataatatggcttgctggcacagtagtttaccctgttatctgtgtttcataatgggggctgtatgaatattatttaaaactaataaaatgttgccagaattatactaaactgttggatgagattaggagatcagaggctggaccttctcttgataatgcttgttttgttaaaggtataatgaaataatttgtatatgatttgatgaagattaaagacccttattttccacagctttaaaaaaaaacctttatttatgatcaagtaataaagataatattctacttgtgggatcttacattatggaaatagtttgacgtttttgacctcaagagtatgtataatttgaagagatactttgtaactatgcttgggtgatattgagcagttcctaaagaataattcattt

SEQ ID NO: 50 - protein, 1648 aa, Homo Sapiens
MSLHSTHNRNNSGDILDIPSSQNSSSLNALTHSSRLKLHLKSDMSECENDDPLLRSAGKVRDINRTYVISASRKTADMPLTPNPVGRLALQRRTTRNKESSLLVSELEDTTEKTAETRLTLQRRAKTDSAEKWKTAEIDSVKMTLNVGGETENNGVSKESRTNVRIVNNAKNSFVASSVPLDEDPQVIEMMADKKYKETFSAPSRANENVALKYSSNRPPIASLSQTEVVRSGHLTTKPTQSKLDIKVLGTGNLYHRSIGKEIAKTSNKFGSLEKRTPTKCTTEHKLTTKCSLPQLKSPAPSILKNRMSNLQVKQRPKSSFLANKQERSAENTILPEEETVVQNTSAGKDPLKVENSQVTVAVRVRPFTKREKIEKASQVVFMSGKEITVEHPDTKQVYNFIYDVSFWSFDECHPHYASQTTVYEKLAAPLLERAFEGFNTCLFAYGQTGSGKSYTMMGFSEEPGIIPRFCEDLFSQVARKQTQEVSYHIEMSFFEVYNEKIHDLLVCKDENGQRKQPLRVREHPVYGPYVEALSMNIVSSYADIQSWLELGNKQRATAATGMNDKSSRSHSVFTLVMTQTKTEFVEGEEHDHRITSRINLIDLAGSERCSTAHTNGDRLKEGVSINKSLLTLGKVISALSEQANQRSVFIPYRESVLTWLLKESLGGNSKTAMIATISPAASNIEETLSTLRYANQARLIVNIAKVNEDMNAKLIRELKAEIAKLKAAQRNSRNIDPERYRLCRQEITSLRMKLHQQERDMAEMQRVWKEKFEQAEKRKLQETKELQKAGIMFQMDNHLPNLVNLNEDPQLSEMLLYMIKEGTTTVGKYKPNSSHDIQLSGVLIADDHCTIKNFGGTVSIIPVGEAKTYVNGKHILEITVLRHGDRVILGGDHYFRFNHPVEVQKGKRPSGRDTPISEGPKDFEFAKNELLMAQRSQLEAEIKEAQLKAKEEMMQGIQIAKEMAQQELSSQKAAYESKIKALEAELREESQRKKMQEINNQKANHKIEELEKAKQHLEQEIYVNKKRLEMETLATKQALEDHSIRHARILEALETEKQKIAKEVQILQQNRNNRDKTFTVQTTWSSMKLSMMIQEANAISSKLKTYYVFGRHDISDKSSSDTSIRVRNLKLGISTFWSLEKFESKLAAMKELYESNGSNRGEDAFCDPEDEWEPDITDAPVSSLSRRRSRSLMKNRRISGCLHDIQVHPIKNLHSSHSSGLMDKSSTIYSNSAESFLPGICKELIGSSLDFFGQSYDEERTIADSLINSFLKIYNGLFAISKAHEEQDEESQDNLFSSDRAIQSLTIQTACAFEQLVVLMKHWLSDLLPCTNIARLEDELRQEVKKLGGYLQLFLQGCCLDISSMIKEAQKNAIQIVQQAVKYVGQLAVLKGSKLHFLENGNNKAASVQEEFMDAVCDGVGLGMKILLDSGLEKAKELQHELFRQCTKNEVTKEMKTNAMGLIRSLENIFAESKIKSFRRQVQEENFEYQDFKRMVNRAPEFLKLKHCLEKAIEIIISALKGCHSDINLLQTCVESIRNLASDFYSDFSVPSTSVGSYESRVTHIVHQELESLAKSLLFCFESEESPDLLKPWETYNQNTKEEHQQSKSSGIDGSKNKGVPKRVYELHGSSPAVSSEECTPSRIQWV

SEQ ID NO: 51 - DNA, 5373 bp, Homo Sapiens
  CDS (1)...(4719)
atggagcggcggctgcgcgcgctggagcagctggcgcggggcgaggccggcggctgcccggggctcgacggcctcctagatctgctgctggcgctgcaccacgagctcagcagcggccccctacggcgggagcgcagcgtggcgcagttcctgagctgggccagccccttcgtatcaaaggtgaaagaactgcgtctgcagagagatgactttgagatcttgaaggtgatcggccgaggagcctttggggaggtcaccgtggtgaggcagagggacactgggcagatttttgccatgaaaatgctgcacaagtgggagatgctgaagagggctgagacagcctgtttccgggaggagcgggatgtgctcgtgaaaggggacagccgttgggtgaccactctgcactatgccttccaagacgaggagtacctgtaccttgtgatggactactatgctggtggggacctcctgacgctgctgagccgcttcgaggaccgtctcccgcccgagctggcccagttctacctggctgagatggtgctggccatccactcgctgcaccagctgggttatgtccacagggatgtcaagccagacaacgtcctgctggatgtgaacgggcacattcgcctggctgacttcggctcctgcctgcgtctcaacaccaacggcatggtggattcatcagtggcagtagggacgccggactatatctcccctgagatcctgcaggccatggaggagggcaagggccactacggcccacagtgtgactggtggtcgcttggagtctgcgcctatgagctgctctttggggagacgcccttctatgctgagtccttggtggaaacctacggcaagatcatgaaccacgaggaccacctgcagttccccccggacgtgcctgacgtgccagccagcgcccaagacctgatccgccagctgctgtgtcgccaggaagagcggctaggccgtggtgggctggatgacttccggaaccatcctttcttcgaaggcgtggactgggagcggctggcgagcagcacggccccctatattcctgagctgcgggggcccatggacacctccaactttgatgtggatgacgacaccctcaaccatccagggaccctgccaccgccctcccacggggccttctccggccatcacctgccattcgtgggcttcacctacacctcaggcagtcacagtcctgagagcagctctgaggcttgggctgccctggagcggaagctccagtgtctggagcaggagaaggtggagctgagcaggaagcaccaagaggccctgcacgcccccacagaccatcgggagctggagcagctacggaaggaagtgcagactctgcgggacaggctgccagagatgctgagggacaaggcctcattgtcccagacggatgggcccccagctggtagcccaggtcaggacagtgacctacggcaggagcttgaccgacttcaccgggagctggccgagggtcgggcagggctgcaggctcaggagcaggagctctgcagggcccaggggcagcaggaggagctgcttcagaggctacaggaggcccaggagagagaggcggccacagctagccagacccgggccctgagctcccagctggaggaagcccgggctgcccagagggagctggaggcccaggtgtcctccctgagccggcaggtgacgcagctgcagggacagtgggagcaacgccttgaggagtcgtcccaggccaagaccatccacacagcctctgagaccaacgggatgggaccccctgagggtgggcctcaggaggcccaactgaggaaggaggtggccgccctgcgagagcagctggagcaggcccacagccacaggccgagtggtaaggaggaggctctgtgccagctgcaggaggaaaaccggaggctgagccgggagcaggagcggctagaagcagagctggcccaggagcaggagagcaagcagcggctggagggtgagcggcgggagacggagagcaactgggaggcccagctcgccgacatcctcagctgggtgaatgatgagaaggtctcaagaggctacctgcaggccctggccaccaagatggcagaggagctggagtccttgaggaacgtaggcacccagacgctccctgcccggccactgaagatggaggcctcggccaggctggagctgcagtcagcgctggaggccgagatccgcgccaagcagggcctgcaggagcggctgacacaggtgcaggaggcccagctgcaggctgagcgccgtctgcaggaggccgagaagcagagccaggccctgcaacaggagctcgccatgctgcgggaggagctgcgggcccgagggccagtggacaccaagccctcaaactccctgattcccttcctgtccttccggagctcagagaaggattctgccaaggaccctggcatctcaggagaggccacaaggcatggaggagagccagatctgaggccggagggccgacgcagcctgcgcatgggggctgtgttccccagagcacccactgccaacacagcctctacagaaggtcttcctgctaagggatggggcatggggccctgggaggccttgggtaatggctgtccccctccccagcccggctcacacacgctgcgcccccggagcttcccatccccgaccaagtgtctccgctgcacctcgctgatgctgggcctgggccgccagggcctgggttgtgatgcctgcggctacttttgtcacacaacctgtgccccacaggccccaccctgccccgtgccccctgacctcctccgcacagccctgggagtacaccccgaaacaggcacaggcactgcctatgagggctttctgtcggtgccgcggccctcaggtgtccggcggggctggcagcgcgtgtttgctgccctgagtgactcacgcctgctgctgtttgacgcccctgacctgaggctcagcccgcccagtggggccctcctgcaggtcctagatctgagggacccccagttctcggctacccctgtcctggcctctgatgttatccatgcccaatccagggacctgccacgcatctttagggtgacaacctcccagctggcagtgccgcccaccacgtgcactgtgctgctgctggcagagagcgagggggagcgggaacgctggctgcaggtgctgggtgagctgcagcggctgctgctggacgcgcggccaagaccccggcccgtgtacacactcaaggaggcttacgacaacgggctgccgctgctgcctcacacgctctgcgctgccatcctcgaccaggatcgacttgcgcttggcaccgaggaggggctctttgtcatccatctgcgcagcaacgacatcttccaggtgggggagtgccggcgcgtgcagcagctgaccttgagccccagtgcaggcctgctggtcgtgctgtgtggccgcggccccagcgtgcgtctctttgccctggcggagctggagaacatagaggtagcaggtgccaagatccccgagtctcgaggctgccaggtgctggcagctggaagcatcctgcaggcccgcaccccggtgctctgtgtagccgtcaagcgccaggtgctctgctaccagctgggcccgggccctgggccctggcagcgccgcatccgtgagctgcaggcacctgccactgtgcagagcctggggctgctgggagaccggctatgtgtgggcgccgccggtggctttgcactctacccgctgctcaacgaggctgcgccgttggcgctgggggccggtttggtgcctgaggagctgccaccatcccgcgggggcctgggtgaggcactgggtgccgtggagcttagcctcagcgagttcctgctactcttcaccactgctggcatctacgtggatggcgcaggccgcaagtctcgtggccacgagctgttgtggccagcagcgcccatgggctgggggtatgcggccccctacctgacagtgttcagcgagaactccatcgatgtgtttgacgtgaggagggcagaatgggtgcagaccgtgccgctcaagaaggtgcggcccctcaatccagagggctccctgttcctctacggcaccgagaaggtccgcctgacctacctcaggaaccagctggcagagaaggacgagttcgacatcccggacctcaccgacaacagccggcgccagctgttccgcaccaagagcaagcgccgcttctttttccgcgtgtcggaggagcagcagaagcagcagcgcagggagatgctgaaggacccttttgtgcgctccaagctcatctcgccgcctaccaacttcaaccacctagtacacgtgggccctgccaacgggcggcccggcgccagggacaagtccccgtcccagcccctccgcactgtcacccaacaggctcccgaagagaagggccgagttgcccgcggctccggcccacagcggccccacagcttctccgaggcgttgcggcgcccagcctccatgggcagcgaaggcctcggtggagacgcagaccccactggagcagtgaagaggaaaccctggacatccctgtccagcgagtctgtgtcctgcccccagggatcgctgagccctgcaacctccctaatgcaggtctcagaacggccccgaagcctccccctgtcccctgaattggagagctctccttgatgccctctgttagggcccaccccaatcccagggcagaaggacatgagggagcaaagagcttgaggaatgccatactccggctggtccgggacatggaaattcggactcagggaggacccgggctgggcaatgactgggagacttgcctgggttcccaggacttgggggtcctgactcccagccctcatcctgccttacccctctgttcccagccccagcctttctaagccattgggaatagaatggccccttttgttctggtgtccaggggtgattgtgccaaagctcttatttccagtgccaagcccccagaggcttgtaagagttgggatgagggatggagagggactgggtctctgggaacaggttggaggtcttatctgtggactgtctgactcccagctgaggccaagatggggcatgtccccgtctctgcttagcgtctgggtgagaaaaacaggctgtgatccagaagaagggaagatagagaaggagggaaaggatgtaggcgaaggaggtgagagacaggataggaggaaggaagtggaggaggaggtggtaggaattggaaggaggtagaagccgtgcagaggaagaggggagagggacgaaggaggagcgatgaagaagaggagggagacaaaaaaagggaag

SEQ ID NO: 52 - protein, 1572 aa, Homo Sapiens
MERRLRALEQLARGEAGGCPGLDGLLDLLLALHHELSSGPLRRERSVAQFLSWASPFVSKVKELRLQRDDFEILKVIGRGAFGEVTVVRQRDTGQIFAMKMLHKWEMLKRAETACFREERDVLVKGDSRWVTTLHYAFQDEEYLYLVMDYYAGGDLLTLLSRFEDRLPPELAQFYLAEMVLAIHSLHQLGYVHRDVKPDNVLLDVNGHIRLADFGSCLRLNTNGMVDSSVAVGTPDYISPEILQAMEEGKGHYGPQCDWWSLGVCAYELLFGETPFYAESLVETYGKIMNHEDHLQFPPDVPDVPASAQDLIRQLLCRQEERLGRGGLDDFRNHPFFEGVDWERLASSTAPYIPELRGPMDTSNFDVDDDTLNHPGTLPPPSHGAFSGHHLPFVGFTYTSGSHSPESSSEAWAALERKLQCLEQEKVELSRKHQEALHAPTDHRELEQLRKEVQTLRDRLPEMLRDKASLSQTDGPPAGSPGQDSDLRQELDRLHRELAEGRAGLQAQEQELCRAQGQQEELLQRLQEAQEREAATASQTRALSSQLEEARAAQRELEAQVSSLSRQVTQLQGQWEQRLEESSQAKTIHTASETNGMGPPEGGPQEAQLRKEVAALREQLEQAHSHRPSGKEEALCQLQEENRRLSREQERLEAELAQEQESKQRLEGERRETESNWEAQLADILSWVNDEKVSRGYLQALATKMAEELESLRNVGTQTLPARPLKMEASARLELQSALEAEIRAKQGLQERLTQVQEAQLQAERRLQEAEKQSQALQQELAMLREELRARGPVDTKPSNSLIPFLSFRSSEKDSAKDPGISGEATRHGGEPDLRPEGRRSLRMGAVFPRAPTANTASTEGLPAKGWGMGPWEALGNGCPPPQPGSHTLRPRSFPSPTKCLRCTSLMLGLGRQGLGCDACGYFCHTTCAPQAPPCPVPPDLLRTALGVHPETGTGTAYEGFLSVPRPSGVRRGWQRVFAALSDSRLLLFDAPDLRLSPPSGALLQVLDLRDPQFSATPVLASDVIHAQSRDLPRIFRVTTSQLAVPPTTCTVLLLAESEGERERWLQVLGELQRLLLDARPRPRPVYTLKEAYDNGLPLLPHTLCAAILDQDRLALGTEEGLFVIHLRSNDIFQVGECRRVQQLTLSPSAGLLVVLCGRGPSVRLFALAELENIEVAGAKIPESRGCQVLAAGSILQARTPVLCVAVKRQVLCYQLGPGPGPWQRRIRELQAPATVQSLGLLGDRLCVGAAGGFALYPLLNEAAPLALGAGLVPEELPPSRGGLGEALGAVELSLSEFLLLFTTAGIYVDGAGRKSRGHELLWPAAPMGWGYAAPYLTVFSENSIDVFDVRRAEWVQTVPLKKVRPLNPEGSLFLYGTEKVRLTYLRNQLAEKDEFDIPDLTDNSRRQLFRTKSKRRFFFRVSEEQQKQQRREMLKDPFVRSKLISPPTNFNHLVHVGPANGRPGARDKSPSQPLRTVTQQAPEEKGRVARGSGPQRPHSFSEALRRPASMGSEGLGGDADPTGAVKRKPWTSLSSESVSCPQGSLSPATSLMQVSERPRSLPLSPELESSP

SEQ ID NO: 53 - DNA, 3286 bp, Homo Sapiens
  CDS (154)...(2709)
aaaaaaggacagcgagcggggagccccgaggacccccttttccctgcccagggattgagctccagagcctgttagggagctacccagacaggctttagttcctaaagtgctgaggaaacgcacggggcggtaaaggggaggctcgtcggtgagatggcgccggatctcgcttctcagaggcattcagagagcttccccagcgtgaactctcggccgaatgtaattttgccaggccgcgagggacgcagagaggggctgccaccaggcgggggcacgcgcggtagtcttgtccctacccgcccggtgccgccgtccccggctcccctcgggacgagtccgtacagctggagccgttccggacccggaaggggcggtggcgcagggtcctcgcgcgtcccacgtggggtcccgggcccagcagtctgcgcaccgggctcgctgctgcaccacgcgtcacccacgcagaccatggcagccgccgacggttcgctcttcgacaaccccaggacgttctccagacgtcccccagcccaggcgagtcggcaagcaaaggctacgaaaagaaaataccaagcgtccagtgaggctcccccagcgaaacggaggaacgaaacttcatttctcccagccaagaaaactagtgttaaagaaactcagaggacttttaaggggaacgcacaaaaaatgttttctccaaagaagcattcggttagcacaagtgatagaaaccaggaggagagacagtgcattaagacttcatcactgtttaaaaacaaccctgacattccagaactccacagacctgtggtaaagcaggtgcaagaaaaagtgtttacttcagctgcttttcatgagctgggcctccacccacatttaatttccacaataaatacggtcttaaaaatgtctagtatgaccagtgttcagaagcaaagtattcctgtgttgctggaaggcagagatgctctcgtgagatcccagacgggctcaggtaaaactcttgcctattgcatccctgtggtccagtcccttcaagcaatggagtcaaaaatacagcgcagtgatggcccctatgccctggtgctcgtgccaacgagagagctagctctacaaagctttgacactgtccagaaactgcttaagcctttcacctggattgtgcctggagtgttaatgggaggagagaagagaaaatcagaaaaggccagactccgcaaaggaataaatatccttatctcaactcctggacgcctggtggatcatataaaatccacaaagaacattcattttagtcggctgcggtggttggtgtttgatgaagcagacagaatcttggatttgggttttgaaaaggacatcacagtgatacttaatgctgtaaatgctgaatgccaaaaacgacagaatgtcttgctatcagcgacactcacagaaggtgtaacgcggctagctgatatcagtttgcatgatccagtcagtatttctgtcctggacaagagccatgaccagttgaacccaaaggacaaagcggtccaggaggtctgtcctccaccagctggcgacaagctggacagctttgcaataccagagagtctcaagcagcatgtgactgtggttcccagcaaactgaggcttgtctgcctagcggccttcatccttcagaaatgcaagtttgaggaagaccagaagatggttgtctttttctcaagttgcgagctggtggagttccactacagcctcttcctacagaccctgctgagcagctcaggggcgccggcatcagggcagttgccatctgcctccatgcgattaaaattcctacggctgcatggcggcatggagcaggaggaaagaacagcagtgtttcaggaattttcacattccagaagaggcgtccttctttgcacggatgttgcagctcggggcttagatctccctcaagtcacgtggattgttcagtacaacgctccatcttcacctgcagaatacatccaccggattggaagaaccgcccggattggctgccatgggagcagcctgctcattttggctccttcggaggcagaatatgtcaactcgttggcttctcacaaaatcaacgtttctgagattaagatggaagatattttgtgtgttctgacaagagatgattgttttaaagggaaacgatggggagcccagaaatcccatgctgttggcccccaggaaatccgagagcgagccacagtcttgcagacggtatttgaagattacgtgcactccagtgagaggagggtctcctgggcaaagaaagctctgcagtccttcatccaagcctacgccacctaccccagggagctgaagcacatcttccacgtccgatccctccaccttgggcatgtggcgaagagcttcggactaagagatgcccccaggaatcttagtgccttgactagaaagaagaggaaagcacacgtgaaaaggcctgaccttcataagaagacccagagtaaacacagcctcgctgaaatcctacgttcggaatactcaagcggcatggaggccgacatcgccaaggtcaaaaagcaaaacgcacctggagagcctggtggccggcccctgcagcacagtctgcagccgacaccctgctttggccgtgggaaaacattaaaatggagaaaaacccaaaaaggtgtacagcgggacagcaagacttcccagaaagtttaaaatctctctgggtcttcgagtggaacctggaagccccgggtggcagtggattgatgtccagttcttgtcagaggaggcttgtgaaaaataactgcgcctttgcctgaataccacgtccccaagaatcagaggggccacagcccttctcctccatgggaggccctggagcctgatagaaatcagtggtgtggggcactgtagagactagccagctcccgacggaaggggtctgtgtcttgtattgatcccatcagtgcccggcactcccttcacccaggtgctgacgtgccggggttgagctggcaccccgggatgtgatgtaagaacgccctgcgcgtcagcctggaacgggcttgattgctgcccttaactgtgttctgaagtttcacagcttggcttcagcctatcagcgcatacattggcatgaattttgtgaattagggtgttaaaaactggaattgaatttgtacaaaaagagaatatatttatcactaattattttcttaatgtaggaatgtaccgttaaaaaggaccaaaagtttttggtctgggtcaaaaaatacgaatgtgttctcag

SEQ ID NO: 54 - protein, 851 aa, Homo Sapiens
MAPDLASQRHSESFPSVNSRPNVILPGREGRREGLPPGGGTRGSLVPTRPVPPSPAPLGTSPYSWSRSGPGRGGGAGSSRVPRGVPGPAVCAPGSLLHHASPTQTMAAADGSLFDNPRTFSRRPPAQASRQAKATKRKYQASSEAPPAKRRNETSFLPAKKTSVKETQRTFKGNAQKMFSPKKHSVSTSDRNQEERQCIKTSSLFKNNPDIPELHRPVVKQVQEKVFTSAAFHELGLHPHLISTINTVLKMSSMTSVQKQSIPVLLEGRDALVRSQTGSGKTLAYCIPVVQSLQAMESKIQRSDGPYALVLVPTRELALQSFDTVQKLLKPFTWIVPGVLMGGEKRKSEKARLRKGINILISTPGRLVDHIKSTKNIHFSRLRWLVFDEADRILDLGFEKDITVILNAVNAECQKRQNVLLSATLTEGVTRLADISLHDPVSISVLDKSHDQLNPKDKAVQEVCPPPAGDKLDSFAIPESLKQHVTVVPSKLRLVCLAAFILQKCKFEEDQKMVVFFSSCELVEFHYSLFLQTLLSSSGAPASGQLPSASMRLKFLRLHGGMEQEERTAVFQEFSHSRRGVLLCTDVAARGLDLPQVTWIVQYNAPSSPAEYIHRIGRTARIGCHGSSLLILAPSEAEYVNSLASHKINVSEIKMEDILCVLTRDDCFKGKRWGAQKSHAVGPQEIRERATVLQTVFEDYVHSSERRVSWAKKALQSFIQAYATYPRELKHIFHVRSLHLGHVAKSFGLRDAPRNLSALTRKKRKAHVKRPDLHKKTQSKHSLAEILRSEYSSGMEADIAKVKKQNAPGEPGGRPLQHSLQPTPCFGRGKTLKWRKTQKGVQRDSKTSQKV

SEQ ID NO: 55 - DNA, 2535 bp, Homo Sapiens
  CDS (762)...(2018)
  misc_feature (1)...(2535): n = A,T,C or G
aggcagaagtatgcaaagcatgcatctcaaattagtcagcaaaccatagtcccggcccctaactccgcccatcccgcccctaactccgncccagttccggcccattctccgccccatggctgactaattttttttatttatgcagagccgaggccgcctcggcctctgagctattccagaagtagtgaggaggcttttttggaggcctaggcttttgcaaaaagctcctcgatcgaggggctcgcatctctccttcacgcgcccgccgccctacctgaggccgccatccacgccggttgagtcgcgttctgccgcctcccgcctgtggtgcctcctgaactgcgtccgccgtctaggtaagtttaaagctcaggtcgagaccgggcctttgtccggcgctcccttggagcctacctagactcagccggctctccacgctttgcctgaccctgcttgctcaactctacgtctttgtttcagttttctgttctgcgccgttacagatccaagctctgaaaaaccagaaagttaactggtaagtttagtctttttgtcttttatttcaggtcccggatccggtggtggtgcaaatcaaagaactgctcctcagtggatgttgcctttacttctaggcctgtacggaagtgttacttctgctctaaaagctgcggaattctaatacgactcactatagggwgtcgacccacgcgtccgctcgccgccgccgctgtcgccgccacctcctctgatctacgaaagtcatgttacccaacaccgggaggctggcaggatgtacagtttttatcacaggtgcaagccgtggcattggcaaagctattgcattgaaagcagcaaaggatggagcaaatattgttattgctgcaaagaccgcccagccacatccaaaacttctaggcacaatctatactgctgctgaagaaattgaagcagttggaggaaaggccttgccatgtattgttgatgtgagagatgaacagcagatcagtgctgcagtggagaaagccatcaagaaatttggaggaattgatattctggtaaataatgccagtgccattagtttgaccaatacattggacacacctaccaagagattggatctgatgatgaacgtgaacaccagaggcacctaccttgcatctaaagcatgtattccttatttgaaaaagagcaaagttgctcatatcctcaatatcagtccaccactgaacctaaatccagtttggttcaaacagcactgtgcttataccattgctaagtatggtatgtctatgtatgtgcttggaatggcagaagaatttaaaggtgaaattgcagtcaatgcattatggcctaaaacagccatacacactgctgctatggatatgctgggaggacctggtatcgaaagccagtgtagaaaagttgatatcattgcagatgcagcatattccattttccaaaagccaaaaagttttactggcaactttgtcattgatgaaaatatcttaaaagaagaaggaatagaaaattttgacgtttatgcaattaaaccaggtcatcctttgcaaccagatttcttcttagatgaatacccagaagcagttagcaagaaagtggaatcaactggtgctgttccagaattcaaagaagagaaactgcagctgcaaccaaaaccacgttctggagctgtggaagaaacatttagaattgttaaggactctctcagtgatgatgttgttaaagccactcaagcaatctatctgtttgaactctccggtgaagatggtggcacgtggtttcttgatctgaaaagcaagggtgggaatgtcggatatggagagccttctgatcaggcagatgtggtgatgagtatgactactgatgactttgtaaaaatgttttcagggaaactaaaaccaacaatggcattcatgtcagggaaattgaagattaaaggtaacatggccctagcaatcaaattggagaagctaatgaatcagatgaatgccagactgtgaaggaaaatataaaaaaaaagtcgactgctatgctcaaaaagtaaaaaaagctcaacagttaaaatctaatgtttgttttctttcctgttatattataaggatatgcacgtttgttctggaaaagatagaatttgtctctaaaagacttgaaattgtaattaaaatggcaagctaatcaaacataagcttcattaagtgggattctaagacagtctgtgtttttatatttcaagggtttaaccctttgagccttacatctcattcactgtctttctccaagaaaagtattttgggcggacagtcagatcaagcagtaaaattagctctttcaaatcttcttgtcatgtaaaatgaagctagtctgttttaaaatttttagttttggattgtatactaatgaaaatcttaatgatgttttkrwtttttatatacytawtttwaarraaawyytwwwwwrkwcmttttwmcaaaaawtwttaaaaawkrrwwwkwrytskgsgmgraswmwawrwrammc

SEQ ID NO: 56 - protein, 418 aa, Homo Sapiens
MLPNTGRLAGCTVFITGASRGIGKAIALKAAKDGANIVIAAKTAQPHPKLLGTIYTAAEEIEAVGGKALPCIVDVRDEQQISAAVEKAIKKFGGIDILVNNASAISLTNTLDTPTKRLDLMMNVNTRGTYLASKACIPYLKKSKVAHILNISPPLNLNPVWFKQHCAYTIAKYGMSMYVLGMAEEFKGEIAVNALWPKTAIHTAAMDMLGGPGIESQCRKVDIIADAAYSIFQKPKSFTGNFVIDENILKEEGIENFDVYAIKPGHPLQPDFFLDEYPEAVSKKVESTGAVPEFKEEKLQLQPKPRSGAVEETFRIVKDSLSDDVVKATQAIYLFELSGEDGGTWFLDLKSKGGNVGYGEPSDQADVVMSMTTDDFVKMFSGKLKPTMAFMSGKLKIKGNMALAIKLEKLMNQMNARL

SEQ ID NO: 57 - DNA, 1298 bp, Homo Sapiens
  CDS (78)...(1166)
ggggcgggaaggtcgcgggcggctgctccggactgcagctcccgcggcggtggcggcgtctcgggacacggcgcgggatggrcgcgcaggactgccaggcggccgcatcgcccgagccgcccgggcccccagcccgtagctgcgtggccgcctggtgggacatggtcgaccgcaacctgcgatattttccacactcctgttcaatgctcggaagaaaaattgctgctctgtatgacagctttactagtaaatccttaaaagaacacgttttccttcctctgatagacatgctaatttattttaattttttcaaagccccatttcttgtggatttaaagaaaccagagttaaagattcctcacacagtgaacttctacctgagagttgaacctggggtgatgctagggatctggcacacagtccccagctgccggggggaagatgccaaggggaaggactgttgctggtatgaagcagcccttcgtgatgggaacccaattattgtttatcttcatggcagtgcagaacacagggcagcttcgcacagactgaagctggtaaaggtgctgagtgatggtggctttcatgtcttgtctgttgactacagaggatttggggactctacaggtaagcccacagaggagggactgactacggatgccatttgtgtctatgagtggaccaaggcaagaagtggcatcactcccgtgtgtctctggggccactctctgggtacaggagttgcaacaaatgctgcaaaagtgctagaagaaaaaggatgcccagttgatgctattgtcttggaagctccatttaccaacatgtgggttgcaagtatcaattatcccttgttaaagatttaccggaacattccaggatttttacgtacacttatggatgccctgagaaaagacaaaataatctttcctaatgatgaaaatgttaaattcctttcttctcctcttctcatcttacatggagaggatgacaggacagtgcctttggagtatgggaaaaagctctatgaaattgcacgcaatgcatacaggaacaaagagagggtcaagatggttatctttcctcctggcttccaacacaacctgctttgtaaaagccccacactgttaataaccgtgagagatttcctgagcaagcagtggtcatgagtctgggaggagtggaaatcttcaatgaagacttggcccaaacaccacctgtgatgtatattgttctaatgtaaaattgtactgggctggtcggatgagctgaggccattgacttctctacaaatcacttgc

SEQ ID NO: 58 - protein, 362 aa, Homo Sapiens
  VARIANT (1)...(362): Xaa = Any Amino Acid
MXAQDCQAAASPEPPGPPARSCVAAWWDMVDRNLRYFPHSCSMLGRKIAALYDSFTSKSLKEHVFLPLIDMLIYFNFFKAPFLVDLKKPELKIPHTVNFYLRVEPGVMLGIWHTVPSCRGEDAKGKDCCWYEAALRDGNPIIVYLHGSAEHRAASHRLKLVKVLSDGGFHVLSVDYRGFGDSTGKPTEEGLTTDAICVYEWTKARSGITPVCLWGHSLGTGVATNAAKVLEEKGCPVDAIVLEAPFTNMWVASINYPLLKIYRNIPGFLRTLMDALRKDKIIFPNDENVKFLSSPLLILHGEDDRTVPLEYGKKLYEIARNAYRNKERVKMVIFPPGFQHNLLCKSPTLLITVRDFLSKQWS

SEQ ID NO: 59 - DNA, 2423 bp, Homo Sapiens
  CDS (49)...(2160)
cccgctggtcgctgccggacggcgtgggcggtggccgcgcagcagctgatgctgagcgcggcgctgcggaccctgaagcatgttctgtactattcaagacagtgcttaatggtgtcccgtaatcttggttcagtgggatatgatcctaatgaaaaaacttttgataaaattcttgttgctaatagaggagaaattgcatgtcgggttattagaacttgcaagaagatgggcattaagacagttgccatccacagtgatgttgatgctagttctgttcatgtgaaaatggcggatgaggctgtctgtgttggcccagctcccaccagtaaaagctacctcaacatggatgccatcatggaagccattaagaaaaccagggcccaagctgtacatccaggttatggattcctttcagaaaacaaagaatttgccagatgtttggcagcagaagatgtcgttttcattggacctgacacacatgctattcaagccatgggcgacaagattgaaagcaaattattagctaagaaagcagaggttaatacaatccctggctttgatggagtagtcaaggatgcagaagaagctgtcagaattgcaagggaaattggctaccctgtcatgatcaaggcctcagcaggtggtggtgggaaaggcatgcgcattgcttgggatgatgaagagaccagggatggttttagattgtcatctcaagaagctgcttctagttttggcgatgatagactactaatagaaaaatttattgataatcctcgtcatatagaaatccaggttctaggtgataaacatgggaatgctttatggcttaatgaaagagagtgctcaattcagagaagaaatcagaaggtggtggaggaagcaccaagcatttttttggatgcggagactcgaagagcgatgggagaacaagctgtagctcttgccagagcagtaaaatattcctctgctgggaccgtggagttccttgtggactctaagaagaatttttatttcttggaaatgaatacaagactccaggttgagcatcctgtcacagaatgcattactggcctggacctagtccaggaaatgatccgtgttgctaagggctaccctctcaggcacaaacaagctgatattcgcatcaacggctgggcagttgaatgtcgggtttatgctgaggacccctacaagtcttttggtttaccatctattgggagattgtctcagtaccaagaaccgttacatctacctggtgtccgagtggacagtggcatccaaccaggaagtgatattagcatttattatgatcctatgatttcaaaactaatcacatatggctctgatagaactgaggcactgaagagaatggcagatgcactggataactatgttattcgaggtgttacacataatattgcattacttcgagaggtgataatcaactcacgctttgtaaaaggagacatcagcactaaatttctctccgatgtgtatcctgatggcttcaaaggacacatgctaaccaagagtgagaagaaccagttattggcaatagcatcatcattgtttgtggcattccagttaagagcacaacattttcaagaaaattcaagaatgcctgttattaaaccagacatagccaactgggagctctcagtaaaattgcatgataaagttcataccgtagtagcatcaaacaatgggtcagtgttctcggtggaagttgatgggtcgaaactaaatgtgaccagcacgtggaacctggcttcgcccttattgtctgtcagcgttgatggcactcagaggactgtccagtgtctttctcgagaagcaggtggaaacatgagcattcagtttcttggtacagtgtacaaggtgaatatcttaaccagacttgccgcagaattgaacaaatttatgctggaaaaagtgactgaggacacaagcagtgttctgcgttccccgatgcccggagtggtggtggccgtctctgtcaagcctggagacgcggtagcagaaggtcaagaaatttgtgtgattgaagccatgaaaatgcagaatagtatgacagctgggaaaactggcacggtgaaatctgtgcactgtcaagctggagacacagttggagaaggggatctgctcgtggagctggaatgaaggatttataacctttcagtcatcacccaatttaattagccatttgcatgatgctttcacacacaattgattcaagcattatacaggaacacccctgtgcagctacgtttacgtcgtcatttattccacagagtcaagaccaatattctgccaaaaaatcaccaatggaaattttcatgatataaatacttgtactatagatgtacttctgctgtgagattccctagtgtcaaaattaaatcaataaaactgagcatttgtct

SEQ ID NO: 60 - protein, 703 aa, Homo Sapiens
MLSAALRTLKHVLYYSRQCLMVSRNLGSVGYDPNEKTFDKILVANRGEIACRVIRTCKKMGIKTVAIHSDVDASSVHVKMADEAVCVGPAPTSKSYLNMDAIMEAIKKTRAQAVHPGYGFLSENKEFARCLAAEDVVFIGPDTHAIQAMGDKIESKLLAKKAEVNTIPGFDGVVKDAEEAVRIAREIGYPVMIKASAGGGGKGMRIAWDDEETRDGFRLSSQEAASSFGDDRLLIEKFIDNPRHIEIQVLGDKHGNALWLNERECSIQRRNQKVVEEAPSIFLDAETRRAMGEQAVALARAVKYSSAGTVEFLVDSKKNFYFLEMNTRLQVEHPVTECITGLDLVQEMIRVAKGYPLRHKQADIRINGWAVECRVYAEDPYKSFGLPSIGRLSQYQEPLHLPGVRVDSGIQPGSDISIYYDPMISKLITYGSDRTEALKRMADALDNYVIRGVTHNIALLREVIINSRFVKGDISTKFLSDVYPDGFKGHMLTKSEKNQLLAIASSLFVAFQLRAQHFQENSRMPVIKPDIANWELSVKLHDKVHTVVASNNGSVFSVEVDGSKLNVTSTWNLASPLLSVSVDGTQRTVQCLSREAGGNMSIQFLGTVYKVNILTRLAAELNKFMLEKVTEDTSSVLRSPMPGVVVAVSVKPGDAVAEGQEICVIEAMKMQNSMTAGKTGTVKSVHCQAGDTVGEGDLLVELE

SEQ ID NO: 61 - DNA, 2864 bp, Homo Sapiens
  CDS (141)...(2678)
cgagttcacccgcggcggagggtaactttgctgtgctgttttttgagcagttgtctggtccctggaagtgtagcatcgagagagttttctaattacgtttacaaaatatcttccctttggccatacaagtggtgactgccatgtcgaactcgcggcccaggtcccgccgagacgccgggggtggcgctggggcagccggccgggacgagctggtgtcgcggtccttgcagagcgcagagcactgtctgggcgtccaggacttcggcactgcctatgcccactacctcctcgtgctcagcctggcgccggagctgaaacacgacgtgaaggaaacttttcagtacacacttttcagatgggctgaagagcttgatgctctcagtcggatacaagacttacttggttgctatgagcaggccttggaactgtttcctgatgatgaagtgatttgcaatagtatgggggagcatctcttcagaatgggctttagggatgaagcagctgggtattttcataaagcagtgaagctaaaccctgatttcagtgatgcaaaggagaatttttatcgtgttgcaaactggttggtggaacgctggcactttatcatgcttaatgacaccaagaggaatacaatttataatgcagcaatccaaaaggcagtttgtttggggtccaaaagtgttttggacattggagcaggaactggaatactaagcatgtttgctaaaaaagctggagcacattccgtgtatgcctgtgagttatccaagaccatgtatgaacttgcctgtgatgtcgtggcagcaaacaagatggaagcagggatcaaactcttacatacgaagtcacttgacatagagattccaaaacatattcccgaaagagtgtccctagttgtaacagaaactgtcgatgcaggtttatttggagaaggaattgtggagagtttgattcatgcatgggagcatttacttttacagccaaagaccaaaggtgaaagtgctaattgtgaaaagtatgggaaagttataccagcaagtgctgttatatttgggatggcagtagaatgtgcagagataagaagacatcatagagtgggtattaaggacattgctggtatccatttgccaacaaatgtgaaatttcagagtccggcttattcttctgtagatactgaagaaacaattgaaccttatacaactgaaaagatgagtcgagttcctggaggatatttggctttgacagagtgctttgaaattatgacagtagatttcaacaaccttcaggaattaaaaagtcttgcaactaaaaagcctgataagattggtattcctgttattaaagaaggcatactagatgctattatggtttggtttgtgctccagcttgatgatgaacatagtttatccacaagtcctagtgaggaaacatgttgggaacaggctgtctaccccgtacaggaccttgcagactactggataaagcctggagaccatgtgatgatggaagtatcttgtcaagactgttacttaagaatccagagtattagtgtcttgggtttggaatgtgaaatggatgttgcaaaaagttttacccagaataaagacttgttatcgttaggaaatgaggctgaactttgtagtgccctcgctaaccttcagaccagtaaaccagatgctgtagagcagacatgtatattggaatctacagaaattgctttgcttaacaacatcccatatcatgaaggctttaaaatggcaatgagcaaagttttgtcttcactgactccagagaaactgtatcagaccatggatactcactgtcagaatgagatgagctctggaactggacagagtaatactgtacagaacatccttgaacctttctacgtgttagatgtgtccgaaggcttctctgttctgcctgttattgctggcacacttgggcaggttaaaccatacagttctgtggagaaagaccagcatcgtattgctctggacctcatatctgaagccaatcactttcctaaagaaacacttgagttttggctgagacatgtggaggatgaatctgctatgttacaaaggccaaaatcagacaagttatggagcataattatattggatgtcattgagccatctgggctcattcagcaggaaataatggaaaaagctgcaatatccaggtgtttactacaatctggaggcaagatctttcctcagtatgtgctgatgtttgggttgcttgtggaatcacagacactcctagaggagaatgctgttcaaggaacagaacgtactcttggattaaatatagcaccttttattaaccagtttcaggtacctatacgtgtatttttggacctatcctcattgccctgtatacctttaagcaagccagtggaactcttaagactagatttaatgactccgtatttgaacacctctaacagagaagtaaaggtatacgtttgtaaatctggaagactgactgctattccattttggtatcatatgtaccttgatgaagagattaggttggatacttcaagtgaagcctcccactggaaacaagctgcagttgttttagataatcccatccaggttgaaatgggagaggaacttgtactcagcattcagcatcacaaaagcaatgtcagcatcacagtaaagcaatgaagagcagttttccaatgaaaactgtgtaaatagagcatcaacaagtacaaaattcttgtcttaattagtgggggtatataaaaattccttgtaatggtcaaatattttttaaaattgacattaataaagcatattttaaaagattctaaataaaagggtagcattattatagaaaaaaaaaaaaaa

SEQ ID NO: 62 - protein, 845 aa, Homo Sapiens
MSNSRPRSRRDAGGGAGAAGRDELVSRSLQSAEHCLGVQDFGTAYAHYLLVLSLAPELKHDVKETFQYTLFRWAEELDALSRIQDLLGCYEQALELFPDDEVICNSMGEHLFRMGFRDEAAGYFHKAVKLNPDFSDAKENFYRVANWLVERWHFIMLNDTKRNTIYNAAIQKAVCLGSKSVLDIGAGTGILSMFAKKAGAHSVYACELSKTMYELACDVVAANKMEAGIKLLHTKSLDIEIPKHIPERVSLVVTETVDAGLFGEGIVESLIHAWEHLLLQPKTKGESANCEKYGKVIPASAVIFGMAVECAEIRRHHRVGIKDIAGIHLPTNVKFQSPAYSSVDTEETIEPYTTEKMSRVPGGYLALTECFEIMTVDFNNLQELKSLATKKPDKIGIPVIKEGILDAIMVWFVLQLDDEHSLSTSPSEETCWEQAVYPVQDLADYWIKPGDHVMMEVSCQDCYLRIQSISVLGLECEMDVAKSFTQNKDLLSLGNEAELCSALANLQTSKPDAVEQTCILESTEIALLNNIPYHEGFKMAMSKVLSSLTPEKLYQTMDTHCQNEMSSGTGQSNTVQNILEPFYVLDVSEGFSVLPVIAGTLGQVKPYSSVEKDQHRIALDLISEANHFPKETLEFWLRHVEDESAMLQRPKSDKLWSIIILDVIEPSGLIQQEIMEKAAISRCLLQSGGKIFPQYVLMFGLLVESQTLLEENAVQGTERTLGLNIAPFINQFQVPIRVFLDLSSLPCIPLSKPVELLRLDLMTPYLNTSNREVKVYVCKSGRLTAIPFWYHMYLDEEIRLDTSSEASHWKQAAVVLDNPIQVEMGEELVLSIQHHKSNVSITVKQ

SEQ ID NO: 63 - DNA, 3082 bp, Homo Sapiens
  CDS (123)...(2168)
agggagtcgtgtcggcgccaccccggcccccgagcccgcagattgcccaccgaagctcgtgtgtgcacccccgatcccgccagccactcgcccctggcctcgcgggccgtgtctccggcatcatgtgtggtatatttgcttacttaaactaccatgttcctcgaacgagacgagaaatcctggagaccctaatcaaaggccttcagagactggagtacagaggatatgattctgctggtgtgggatttgatggaggcaatgataaagattgggaagccaatgcctgcaaaacccagcttattaagaagaaaggaaaagttaaggcactggatgaagaagttcacaagcaacaagatatggatttggatatagaatttgatgtacaccttggaatagctcatacccgttgggcaacacatggagaacccagtcctgtcaatagccacccccagcgctctgataaaaataatgaatttatcgttattcacaatggaatcatcaccaactacaaagacttgaaaaagtttttggaaagcaaaggctatgacttcgaatctgaaacagacacagagacaattgccaagctcgttaagtatatgtatgacaatcgggaaagtcaagataccagctttactaccttggtggagagagttatccaacaattggaaggtgcttttgcacttgtgtttaaaagtgttcattttcccgggcaagcagttggcacaaggcgaggtagccctctgttgattggtgtacggagtgaacataaactttctactgatcacattcctatactctacagaacaggcaaagacaagaaaggaagctgcaatctctctcgtgtggacagcacaacctgccttttcccggtggaagaaaaagcagtggagtattactttgcttctgatgcaagtgctgtcatagaacacaccaatcgcgtcatctttctggaagatgatgatgttgcagcagtagtggatggacgtctttctatccatcgaattaaacgaactgcaggagatcaccccggacgagctgtgcaaacactccagatggaactccagcagatcatgaagggcaacttcagttcatttatgcagaaggaaatatttgagcagccagagtctgtcgtgaacacaatgagaggaagagtcaactttgatgactatactgtgaatttgggtggtttgaaggatcacataaaggagatccagagatgccggcgtttgattcttattgcttgtggaacaagttaccatgctggtgtagcaacacgtcaagttcttgaggagctgactgagttgcctgtgatggtggaactagcaagtgacttcctggacagaaacacaccagtctttcgagatgatgtttgctttttccttagtcaatcaggtgagacagcagatactttgatgggtcttcgttactgtaaggagagaggagctttaactgtggggatcacaaacacagttggcagttccatatcacgggagacagattgtggagttcatattaatgctggtcctgagattggtgtggccagtacaaaggcttataccagccagtttgtatcccttgtgatgtttgcccttatgatgtgtgatgatcggatctccatgcaagaaagacgcaaagagatcatgcttggattgaaacggctgcctgatttgattaaggaagtactgagcatggatgacgaaattcagaaactagcaacagaactttatcatcagaagtcagttctgataatgggacgaggctatcattatgctacttgtcttgaaggggcactgaaaatcaaagaaattacttatatgcactctgaaggcatccttgctggtgaattgaaacatggccctctggctttggtggataaattgatgcctgtgatcatgatcatcatgagagatcacacttatgccaagtgtcagaatgctcttcagcaagtggttgctcggcaggggcggcctgtggtaatttgtgataaggaggatactgagaccattaagaacacaaaaagaacgatcaaggtgccccactcagtggactgcttgcagggcattctcagcgtgatccctttacagttgctggctttccaccttgctgtgctgagaggctatgatgttgatttcccacggaatcttgccaaatctgtgactgtagagtgaggaatatctatacaaaatgtacgaaactgtatgattaagcaacacaagacaccttttgtatttaaaaccttgatttaaaatatcaccccttgaagcctttttttagtaaatccttatttatatatcagttataattattccactcaatatgtgatttttgtgaagttacctcttacattttcccagtaatttgtggaggactttgaataatggaatctatattggaatctgtatcagaaagattctagctattattttctttaaagaatgctgggtgttgcatttctggaccctccacttcaatctgagaagacaatatgtttctaaaaattggtacttgtttcaccatacttcattcagaccagtgaaagagtagtgcatttaattggagtatctaaagccagtggcagtgtatgctcatacttggacagttagggaagggtttgccaagttttaagagaagatgtgatttattttgaaatttgtttctgttttgtttttaaatcaaactgtaaaacttaaaactgaaaaattttattggtaggatttatatctaagtttggttagccttagtttctcagacttgttgtctattatctgtaggtggaagaaatttaggaagcgaaatattacagtagtgcattggtgggtctcaatccttaacatatttgcacaattttatagcacaaactttaaattcaagctgctttggacaactgacaatatgattttaaatttgaagatgggatgtgtacatgttgggtatcctactactttgtgttttcatctcctaaaagtgttttttatttccttgtatctgtagtcttttattttttaaatgactgctgaatgacatattttatcttgttctttaaaatcacaacacagagctgctattaaattaatattgatat

SEQ ID NO: 64 - protein, 681 aa, Homo Sapiens
MCGIFAYLNYHVPRTRREILETLIKGLQRLEYRGYDSAGVGFDGGNDKDWEANACKTQLIKKKGKVKALDEEVHKQQDMDLDIEFDVHLGIAHTRWATHGEPSPVNSHPQRSDKNNEFIVIHNGIITNYKDLKKFLESKGYDFESETDTETIAKLVKYMYDNRESQDTSFTTLVERVIQQLEGAFALVFKSVHFPGQAVGTRRGSPLLIGVRSEHKLSTDHIPILYRTGKDKKGSCNLSRVDSTTCLFPVEEKAVEYYFASDASAVIEHTNRVIFLEDDDVAAVVDGRLSIHRIKRTAGDHPGRAVQTLQMELQQIMKGNFSSFMQKEIFEQPESVVNTMRGRVNFDDYTVNLGGLKDHIKEIQRCRRLILIACGTSYHAGVATRQVLEELTELPVMVELASDFLDRNTPVFRDDVCFFLSQSGETADTLMGLRYCKERGALTVGITNTVGSSISRETDCGVHINAGPEIGVASTKAYTSQFVSLVMFALMMCDDRISMQERRKEIMLGLKRLPDLIKEVLSMDDEIQKLATELYHQKSVLIMGRGYHYATCLEGALKIKEITYMHSEGILAGELKHGPLALVDKLMPVIMIIMRDHTYAKCQNALQQVVARQGRPVVICDKEDTETIKNTKRTIKVPHSVDCLQGILSVIPLQLLAFHLAVLRGYDVDFPRNLAKSVTVE

SEQ ID NO: 65 - DNA, 2455 bp, Homo Sapiens
  CDS (1)...(2403)
atgtcgtctctcggtgcctcctttgtgcaaattaaatttgatgacttgcagttttttgaaaactgcggtggaggaagttttgggagtgtttatcgagccaaatggatatcacaggacaaggaggtggctgtaaagaagctcctcaaaatagagaaagaggcagaaatactcagtgtcctcagtcacagaaacatcatccagttttatggagtaattcttgaacctcccaactatggcattgtcacagaatatgcttctctgggatcactctatgattacattaacagtaacagaagtgaggagatggatatggatcacattatgacctgggccactgatgtagccaaaggaatgcattatttacatatggaggctcctgtcaaggtgattcacagagacctcaagtcaagaaacgttgttatagctgctgatggagtattgaagatctgtgactttggtgcctctcggttccataaccatacaacacacatgtccttggttggaactttcccatggatggctccagaagttatccagagtctccctgtgtcagaaacttgtgacacatattcctatggtgtggttctctgggagatgctaacaagggaggtcccctttaaaggtttggaaggattacaagtagcttggcttgtagtggaaaaaaacgagagattaaccattccaagcagttgccccagaagttttgctgaactgttacatcagtgttgggaagctgatgccaagaaacggccatcattcaagcaaatcatttcaatcctggagtccatgtcaaatgacacgagccttcctgacaagtgtaactcattcctacacaacaaggcggagtggaggtgcgaaattgaggcaactcttgagaggctaaagaaactagagcgtgatctcagctttaaggagcaggagcttaaagaacgagaaagacgtttaaagatgtgggagcaaaagctgacagagcagtccaacaccccgctgctgccttcctttgagattggtgcatggacggaagacgatgtgtattggtgggttcagcagctcgtcagaaaaggtgactcttcagcagagatgagtgtatatgcaagcttgtttaaagaaaacaacattacagggaagcggctgctgctgctggaggaagaagacctgaaagacatgggcattgtctccaaggggcatatcattcacttcaagtcagccattgagaaattaacccatgattacataaatttgtttcacttcccaccactaattaaggactcaggaggtgaacctgaagaaaatgaggaaaaaatagtgaacctggaactggtttttggttttcacttgaaaccaggaactggcccacaggattgtaagtggaaaatgtatatggagatggatggggatgaaattgcaataacctacataaaagatgtgacattcaacactaacctacctgatgcggagattttaaagatgacaaagccaccatttgtaatggagaagtggattgtaggaatagcaaaaagtcagactgtggagtgcactgtcacatatgagagtgatgttagaactccaaaaagcactaaacatgtccatttgattcagtggagtagaacaaaacctcaggatgaagtgaaagcagtccaacttgccattcagacattattcaccaattcagatggcaaccctggaagcaggtccgactcaagtgctgattgccagtggttagatactctgaggatgcggcagattgcatccaacacttctttacagcgttcccagagcaatcctattctggggtcaccgttcttctcacactttgatggccaggattcctacgctgctgctgtgagacggccccaggtgcccattaagtatcaacagattacacctgtgaaccagtccagaagctcgtctcctactcagtatggactgaccaaaaacttctcttccttacatctcaactctagggacagtggcttttccagtggcaatactgacacctcttcagagaggggtcgatactcagacagaagcaggaacaaatatggacgtggtagtatatcactcaattcttctcctagaggaagatacagtggaaagagtcagcattccactccatcaagaggaagataccctggaaagttctacagggtttctcagtcagcactcaatcctcaccagtcgcctgacttcaagagaagccccagggacctccaccaacccaacaccataccagggatgcctttgcaccctgagactgactcaagagccagtgaagaggacagcaaagtcagcgaagggggctggacaaaagtggaataccggaaaaagccccacaggccatctcccgccaaaaccaataaagagagagccagaggggaccaccgtggatggagaaacttttgatgaattgaactacatagcttttctaagcaggttaaaaaaaaaaaaaaaaaaa

SEQ ID NO: 66 - protein, 800 aa, Homo Sapiens [sequence omitted]

SEQ ID NO: 67 - DNA, 2565 bp, Homo Sapiens
  CDS (20)...(2338)
gtgccgaccaacccccaggatggcggaagctcaccaggccgtggccttccagttcacggtgaccccagacggggtcgacttccggctcagtcgggaggccctgaaacacgtctacctgtctgggatcaactcctggaagaaacgcctgatccgcatcaagaatggcatcctcaggggcgtgtaccctggcagccccaccagctggctggtcgtcatcatggcaacagtgggttcctccttctgcaacgtggacatctccttggggctggtcagttgcatccagagatgcctccctcaggggtgtggcccctaccagaccccgcagacccgggcacttctcagcatggccatcttctccacgggcgtctgggtgacgggcatcttcttcttccgccaaaccctgaagctgcttctctgctaccatgggtggatgtttgagatgcatggcaagaccagcaacttgaccaggatctgggctatgtgtatccgccttctatccagccggcaccctatgctctacagcttccagacatctctgcccaagcttcctgtgcccagggtgtcagccacaattcagcggtacctagagtctgtgcgccccttgttggatgatgaggaatattaccgcatggagttgctggccaaagaattccaggacaagactgcccccaggctgcagaaatacctggtgctcaagtcatggtgggcaagtaactatgtgagtgactggtgggaagagtacatctaccttcgaggcaggagccctctcatggtgaacagcaactattatgtcatggaccttgtgctcatcaagaatacagacgtgcaggcagcccgcctgggaaacatcatccacgccatgatcatgtatcgccgtaaactggaccgtgaagaaatcaagcctgtgatggcactgggcatagtgcctatgtgctcctaccagatggagaggatgttcaacaccactcggatcccgggcaaggacacagatgtgctacagcacctctcagacagccggcacgtggctgtctaccacaagggacgcttcttcaagctgtggctctatgagggcgcccgtctgctcaagcctcaggatctggagatgcagttccagaggatcctggacgacccctccccacctcagcctggggaggagaagctggcagccctcactgcaggaggaagggtggagtgggcgcaggcacgccaggccttctttagctctggaaagaataaggctgccttggaggccatcgagcgtgccgctttcttcgtggccctggatgaggaatcctactcctatgaccccgaagatgaggccagcctcagcctctatggcaaggccctgctacatggcaactgctacaacaggtggtttgacaaatccttcactctcatttccttcaagaatggccagttgggtctcaatgcagagcatgcgtgggcagatgctcccatcattgggcacctctgggagtttgtcctgggcacagacagcttccacctgggctacacggagaccgggcactgcctgggcaaaccgaaccctgcgctcgcacctcctacacggctgcagtgggacattccaaaacagtgccaggcggtcatcgagagttcctaccaggtggccaaggcgttggcagacgacgtggagttgtactgcttccagttcctgccctttggcaaaggcctcatcaagaagtgccggaccagccctgatgcctttgtgcagatcgcgctgcagctggctcacttccgggacaggggtaagttctgcctgacctatgaggcctcaatgaccagaatgttccgggagggacggactgagactgtgcgttcctgtaccagcgagtccacagcctttgtgcaggccatgatggaggggtcccacacaaaagcagacctgcgagatctcttccagaaggctgctaagaagcaccagaatatgtaccgcctggccatgaccggggcagggatcgacaggcacctcttctgcctttacttggtctccaagtacctaggagtcagctctcctttccttgctgaggtgctctcggaaccctggcgtctctccaccagccagatcccccaatcccagatccgcatgttcgacccagagcagcaccccaatcacctgggcgctggaggtggctttggccctgtagcagatgatggctatggagtttcctacatgattgcaggcgagaacacgatcttcttccacatctccagcaagttctcaagctcagagacgaacgcccagcgctttggaaaccacatccgcaaagccctgctggacattgctgatcttttccaagttcccaaggcctacagctgaagcccttaggtacctgtgttttgtttgggaactcggaggccctccccctcccccagctcagaccacagaggtggcaagagaagggctgaagctggaagactgttcatgagggacttgtgtgacctgctttgaaatgtgtgactctgctgagtgacgtaggctctgagatagctgtccacgcccacgtgtttgcttggaataaatacttgcctcagaaccttcaaaaa

SEQ ID NO: 68 - protein, 772 aa, Homo Sapiens
MAEAHQAVAFQFTVTPDGVDFRLSREALKHVYLSGINSWKKRLIRIKNGILRGVYPGSPTSWLVVIMATVGSSFCNVDISLGLVSCIQRCLPQGCGPYQTPQTRALLSMAIFSTGVWVTGIFFFRQTLKLLLCYHGWMFEMHGKTSNLTRIWAMCIRLLSSRHPMLYSFQTSLPKLPVPRVSATIQRYLESVRPLLDDEEYYRMELLAKEFQDKTAPRLQKYLVLKSWWASNYVSDWWEEYIYLRGRSPLMVNSNYYVMDLVLIKNTDVQAARLGNIIHAMIMYRRKLDREEIKPVMALGIVPMCSYQMERMFNTTRIPGKDTDVLQHLSDSRHVAVYHKGRFFKLWLYEGARLLKPQDLEMQFQRILDDPSPPQPGEEKLAALTAGGRVEWAQARQAFFSSGKNKAALEAIERAAFFVALDEESYSYDPEDEASLSLYGKALLHGNCYNRWFDKSFTLISFKNGQLGLNAEHAWADAPIIGHLWEFVLGTDSFHLGYTETGHCLGKPNPALAPPTRLQWDIPKQCQAVIESSYQVAKALADDVELYCFQFLPFGKGLIKKCRTSPDAFVQIALQLAHFRDRGKFCLTYEASMTRMFREGRTETVRSCTSESTAFVQAMMEGSHTKADLRDLFQKAAKKHQNMYRLAMTGAGIDRHLFCLYLVSKYLGVSSPFLAEVLSEPWRLSTSQIPQSQIRMFDPEQHPNHLGAGGGFGPVADDGYGVSYMIAGENTIFFHISSKFSSSETNAQRFGNHIRKALLDIADLFQVPKAYS

SEQ ID NO: 69 - DNA, 2297 bp, Homo Sapiens
  CDS (125)...(1777)
cggctgtgttgcgcagtcttcatgggttcccgacgaggaggtctctgtggctgcggcggctgctaactgcgccacctgctgcagcctgtccccgccgctctgaagcggccgcgtcgaagccgaaatgccgccaccccggaccggccgaggccttctctggctgggtctggttctgagctccgtctgcgtcgccctcggatccgaaacgcaggccaactcgaccacagatgctctgaacgttcttctcatcatcgtggatgacctgcgcccctccctgggctgttatggggataagctggtgaggtccccaaatattgaccaactggcatcccacagcctcctcttccagaatgcctttgcgcagcaagcagtgtgcgccccgagccgcgtttctttcctcactggcaggagacctgacaccacccgcctgtacgacttcaactcctactggagggtgcacgctggaaacttctccaccatcccccagtacttcaaggagaatggctatgtgaccatgtcggtgggaaaagtctttcaccctgggatatcttctaaccataccgatgattctccgtatagctggtcttttccaccttatcatccttcctctgagaagtatgaaaacactaagacatgtcgagggccagatggagaactccatgccaacctgctttgccctgtggatgtgctggatgttcccgagggcaccttgcctgacaaacagagcactgagcaagccatacagttgttggaaaagatgaaaacgtcagccagtcctttcttcctggccgttgggtatcataagccacacatccccttcagataccccaaggaatttcagaagttgtatcccttggagaacatcaccctggcccccgatcccgaggtccctgatggcctaccccctgtggcctacaacccctggatggacatcaggcaacgggaagacgtccaagccttaaacatcagtgtgccgtatggtccaattcctgtggactttcagcggaaaatccgccagagctactttgcctctgtgtcatatttggatacacaggtcggccgcctcttgagtgctttggacgatcttcagctggccaacagcaccatcattgcatttacctcggatcatgggtgggctctaggtgaacatggagaatgggccaaatacagcaattttgatgttgctacccatgttcccctgatattctatgttcctggaaggacggcttcacttccggaggcaggcgagaagcttttcccttacctcgacccttttgattccgcctcacagttgatggagccaggcaggcaatccatggaccttgtggaacttgtgtctctttttcccacgctggctggacttgcaggactgcaggttccacctcgctgccccgttccttcatttcacgttgagctgtgcagagaaggcaagaaccttctgaagcattttcgattccgtgacttggaagaggatccgtacctccctggtaatccccgtgaactgattgcctatagccagtatccccggccttcagacatccctcagtggaattctgacaagccgagtttaaaagatataaagatcatgggctattccatacgcaccatagactataggtatactgtgtgggttggcttcaatcctgatgaatttctagctaacttttctgacatccatgcaggggaactgtattttgtggattctgacccattgcaggatcacaatatgtataatgattcccaaggtggagatcttttccagttgttgatgccttgagttttgccaaccatggatggcaaatgtgatgtgctcccttccagctggtgagaggaggagttagagctggtcgttttgtgattacccataatattggaagcagcctgagggctagttaatccaaacatgcatcaacaatttggcctgagaatatgtaacagccaaaccttttcgtttagtctttattaaaatttataattggtaattggaccagttttttttttaatttccctctttttaaaacagttacggcttatttactgaataaatacaaagcaaacaaactcaagttatgtcatacctttggatacgaagaccatacataataaccaaacataacattatacacaaagaatactttcattatttgtggaatttagtgcatttcaaaaagtaatcatatatcaaactaggcaccacactaagttcctgattattttgtttataatttaataatatatcttatgagccctatatattcaaaatattatgttaacatgtaatccatgtttctttttcc

SEQ ID NO: 70 - protein, 550 aa, Homo Sapiens
MPPPRTGRGLLWLGLVLSSVCVALGSETQANSTTDALNVLLIIVDDLRPSLGCYGDKLVRSPNIDQLASHSLLFQNAFAQQAVCAPSRVSFLTGRRPDTTRLYDFNSYWRVHAGNFSTIPQYFKENGYVTMSVGKVFHPGISSNHTDDSPYSWSFPPYHPSSEKYENTKTCRGPDGELHANLLCPVDVLDVPEGTLPDKQSTEQAIQLLEKMKTSASPFFLAVGYHKPHIPFRYPKEFQKLYPLENITLAPDPEVPDGLPPVAYNPWMDIRQREDVQALNISVPYGPIPVDFQRKIRQSYFASVSYLDTQVGRLLSALDDLQLANSTIIAFTSDHGWALGEHGEWAKYSNFDVATHVPLIFYVPGRTASLPEAGEKLFPYLDPFDSASQLMEPGRQSMDLVELVSLFPTLAGLAGLQVPPRCPVPSFHVELCREGKNLLKHFRFRDLEEDPYLPGNPRELIAYSQYPRPSDIPQWNSDKPSLKDIKIMGYSIRTIDYRYTVWVGFNPDEFLANFSDIHAGELYFVDSDPLQDHNMYNDSQGGDLFQLLMP

SEQ ID NO: 71 - DNA, 4548 bp, Homo Sapiens
  CDS (451)...(3729)
gaattccgggagcccgcggaggctgctgcagcagcccgaaccggcgtccgagtccggggaaggcccccgcgagcgcagggaggggccggaaagttccggcgaactgggggagcggcagtgggagagcgtcgggcgggaggcggtggtcctgggagcggccccggcgcccgaagccgccccgagctggtggggagggtcccggccggtggggccgggctggcgggggaggggcgcctgggggtgcaagaggcgaattggctgcccggggtgcaggagggacaggtggtgcgggctgtcaggaaacctacctgaacgggaaggagccccaggagggagagggacccggcgagggctcaggacccggaggcgccggcggaggaggaggtggtgactggcaggcccgggccccacggtacctccggggctgaaggggacgcaggatgtaggggcatggggagtcgggcgcagaagagtgcggggaacgctgagctctgggagccactgcctgagggcaggccgcggccggcgggaacctcttctgccgtctcagcctgggcgtcgctgaagctgtgtctgcggggaggcagcggaaggcggcagaggctgggaggcggcagaatgcagccagaggagggcacaggctggctgctggagctgctgtccgaggtgcagctgcaacagtacttcctgcggctccgagatgacctcaacgtcacccgcctgtcccactttgagtacgtcaagaatgaggacctggagaagatcggcatgggtcggcctggccagcggcggctgtgggaggctgtgaagaggaggaaggccttgtgcaaacgcaagtcgtggatgagtaaggtgttcagtggaaagcgactggaggctgagttcccacctcatcactctcagagcaccttccggaagacctcgcccgcccctgggggcccagcaggggaggggcccctgcagagcctcacctgcctcattggggagaaggacctgcgcctcctggagaagctgggtgatggttcctttggcgtggtgcgcaggggcgagtgggacgcgccctcagggaagacggtgagtgtggctgtgaagtgcctgaagcccgatgtcctgagccagccagaagccatggacgacttcatccgggaggtcaatgccatgcactcgctcgaccaccgaaacctcatccgcctctacggggtggtgctcacgccgcccatgaagatggtgacagagctggcacctctgggatcgttgttggaccggctacgtaagcaccagggccacttcctcctggggactctgagccgctacgctgtgcaggtggctgagggcatgggctacctggagtccaagcgctttattcaccgtgacctggctgcccgcaatctgctgttggctacccgcgacctggtcaagatcggggactttgggctgatgcgagcactacctcagaatgacgaccattacgtcatgcaggaacatcgcaaggtgcccttcgcctggtgtgcccccgagagcctgaagacacgcaccttctcccatgccagcgacacctggatgttcggggtgacactgtgggaaatgttcacctacggccaggagccctggatcggcctcaacggcagtcagatcctgcataagatcgacaaggagggggagcggctgccccggcccgaggactgtccccaggacatctacaacgtcatggtccagtgctgggctcacaagccagaggacagacccacgtttgtggccctgcgggacttcctgctggaggcccagcccacagacatgcgggcccttcaggactttgaggaaccggacaagctgcacatccagatgaatgatgtcatcaccgtcatcgagggaagggccgagaactactggtggcgtggccagaacacacggacgctgtgtgtggggcccttccctcgcaacgtggtgacctccgtggccggcctgtcggcccaggacatcagccagcccctgcagaacagcttcatccacacagggcatggcgacagtgacccccgccactgctggggcttcccggacaggattgacgaactgtatctgggaaaccccatggacccccccgacctcctgagcgtggaactgagcacctcccggcccccccagcatctaggaggggtgaaaaaaccaacctatgaccctgtgagcgaggaccaagaccccttgtccagcgacttcaagaggctgggcctgcggaagccaggcctgccccgagggctgtggctggcgaagccctcggcgcgggtgccgggcaccaaggccagccgaggcagcggggctgaggtcacgctcatcgacttcggtgaggagcccgtggtcccggccctacggccctgcccgccctccctggcgcagctggccatggacgcctgctccctgctggacgagaccccgcctcagagccccacgcgggcactgccccggcccctgcaccccacgcctgtggtggactgggacgcacgcccgctgccccccccgcccgcctatgacgacgtggcccaggatgaggatgactttgagatctgctccatcaacagcaccctcgtgggcgcgggggtccctgccgggcccagccagggccagaccaactacgcctttgtgcctgagcaggcgcggccgccccctcccctggaggacaacctgttcctcccgccccagggtgggggcaagccgcccagctccgcacagaccgcagagatcttccaggcgctacagcaggagtgcatgaggcaactgcaggctccgggctccccggccccctctcccagcccggggggtgacgacaagccccaggtgcctcctcgggtacccatcccccctcggcccacgcgcccacacgtccagctgtctccagcccccccgggcgaggaggagaccagccagtggcctggacctgcttcccctccccgggtgcctccgcgggagcccctgtcccctcaaggctcgaggacacccagccccctggtaccacctggcagctccccgctgccaccccggctctcaagctcacctgggaagaccatgcccaccacccagagctttgcctcagaccccaagtacgccaccccccaggtgatccaggcccctggcgcgggtggtccctgcatcctgcccatcgtccgggatggcaagaaggtcagcagcacccactattacttgctgcccgagcgaccatcctacctggagcgctaccagcgcttcctgcgtgaggcccagagccccgaggagcctacccccctgcctgtgcctctgctgctgcccccacccagcaccccagcccccgccgcccccacggccaccgtgcggccgatgccccaggctgccttggaccccaaggccaacttctccaccaacaacagcaacccaggggcccggccaccacccccgagggccactgctcggctgccacagaggggctgccctggcgatgggccagaggcgggccggccagcagacaagatccagatggccatggtgcatggggtgaccacagaggagtgccaggcggccctgcagtgccacggctggagcgtgcagagggctgcccagtatctgaaggtggagcagctcttcgggctgggtctgcggcccagaggggagtgccacaaagtgctggagatgttcgactggaacctggagcaggccggctgccaccttctgggctcctggggccctgcccaccacaagcgctgagatgcgtctggagagccagagggcctgcctgaaggaatcacctgagcctgtccgtccaccaggagtggggagatgcccccatccagtcctggaggacccgctgctcctgctgctcccggggatggagcaaggccaaggctgcgggaggctgggagccctgccctgcccatccctcccgcaccagtgctgtccctgcacactttggttcagtcccggtgcccctgccaagatgtggaaggggccgggtgaagacaggcttgagggccgccccagcaggctctgggtatgacctgcctctggccctggtcctgggcggggcctgtgggtggagtagtacccccaggccctgccctgggtgacagactgggaggaaaccaggctggacctgggcaggcgggatgtgttggccacagggagaggcggaccggcacccggtgggacctcctaggactgggccttcttccagggggcccctggcagcagctggggtgtcgggcagaatgtgacttgtggccttaccatggacttgaatgggacttggctggcctcaggatcttgtgcctggaaatagcctgaggtggctcaggaagcggagaaagggtgccagaccattctctggcggggaccagggcccaaggccagggctggaaggagaccaaggggcagcccctggaggacatcagtgcttcctcttccacccaattcccccacgcggttccatgttttcccaccagcctgttgggcgaagttgctgctccggcattcagtcctgcttcttccagagaaataaagttagtttctattttatgttaaaaaaaa

SEQ ID NO: 72 - protein, 1092 aa, Homo Sapiens
MGSRAQKSAGNAELWEPLPEGRPRPAGTSSAVSAWASLKLCLRGGSGRRQRLGGGRMQPEEGTGWLLELLSEVQLQQYFLRLRDDLNVTRLSHFEYVKNEDLEKIGMGRPGQRRLWEAVKRRKALCKRKSWMSKVFSGKRLEAEFPPHHSQSTFRKTSPAPGGPAGEGPLQSLTCLIGEKDLRLLEKLGDGSFGVVRRGEWDAPSGKTVSVAVKCLKPDVLSQPEAMDDFIREVNAMHSLDHRNLIRLYGVVLTPPMKMVTELAPLGSLLDRLRKHQGHFLLGTLSRYAVQVAEGMGYLESKRFIHRDLAARNLLLATRDLVKIGDFGLMRALPQNDDHYVMQEHRKVPFAWCAPESLKTRTFSHASDTWMFGVTLWEMFTYGQEPWIGLNGSQILHKIDKEGERLPRPEDCPQDIYNVMVQCWAHKPEDRPTFVALRDFLLEAQPTDMRALQDFEEPDKLHIQMNDVITVIEGRAENYWWRGQNTRTLCVGPFPRNVVTSVAGLSAQDISQPLQNSFIHTGHGDSDPRHCWGFPDRIDELYLGNPMDPPDLLSVELSTSRPPQHLGGVKKPTYDPVSEDQDPLSSDFKRLGLRKPGLPRGLWLAKPSARVPGTKASRGSGAEVTLIDFGEEPVVPALRPCPPSLAQLAMDACSLLDETPPQSPTRALPRPLHPTPVVDWDARPLPPPPAYDDVAQDEDDFEICSINSTLVGAGVPAGPSQGQTNYAFVPEQARPPPPLEDNLFLPPQGGGKPPSSAQTAEIFQALQQECMRQLQAPGSPAPSPSPGGDDKPQVPPRVPIPPRPTRPHVQLSPAPPGEEETSQWPGPASPPRVPPREPLSPQGSRTPSPLVPPGSSPLPPRLSSSPGKTMPTTQSFASDPKYATPQVIQAPGAGGPCILPIVRDGKKVSSTHYYLLPERPSYLERYQRFLREAQSPEEPTPLPVPLLLPPPSTPAPAAPTATVRPMPQAALDPKANFSTNNSNPGARPPPPRATARLPQRGCPGDGPEAGRPADKIQMAMVHGVTTEECQAALQCHGWSVQRAAQYLKVEQLFGLGLRPRGECHKVLEMFDWNLEQAGCHLLGSWGPAHHKR

SEQ ID NO: 73 - DNA, 1859 bp, Homo Sapiens
  CDS (218)...(1627)
aacactgcagcgtgaactgaggagtcccggacaggccgcttgctgcagaggatccagtccagatcccaggagagcccctctgccccttcggacctcgtctcccatctacaaaacgtgaagattggcccagttggcgtgtctctacaaaaaggtgcatataccactgccccgctgcaggctgatctgagaaagcctctggcccagggcagataccgccatggccttcctgatgcacctgctggtctgcgtcttcggaatgggctcctgggtgaccatcaatgggctctgggtagagctgcccctgctggtgatggagctgcccgagggctggtacctgccctcctacctcacggtggtcatccagctggccaacatcgggcccctcctggtcaccctgctccatcacttccggcccagctgcctttccgaagtgcccatcatcttcaccctgctgggcgtgggaaccgtcacctgcatcatctttgccttcctctggaatatgacctcctgggtgctggacggccaccacagcatcgccttcttggtcctcaccttcttcctggccctggtggactgcacctcttcagtgaccttcctgccgttcatgagccggctgcccacctactacctcaccaccttctttgtgggtgaaggactcagcggcctcttgcccgccctggtggctcttgcccagggctccggtctcactacctgcgtcaatgtcactgagatatcagacagcgtaccaagccctgtacccacgagggagactgacatcgcacagggagttcccagagctttggtgtccgccctccccggaatggaagcacccttgtcccacctggagagccgctaccttcccgcccacttctcacccctggtcttcttcctcctcctatccatcatgatggcctgctgcctcgtggcgttctttgtcctccagcgtcaacccaggtgctgggaggcttccgtggaagaccttctcaatgaccaggtcaccctccactccatccggccgcgggaagagaatgacttgggccctgcaggcacggtggacagcagccagggccaggggtatctagaggagaaagcagccccctgctgcccggcgcacctggccttcatctataccctggtggccttcgtcaacgcgctcaccaacggcatgctgccctctgtgcagacctactcctgcctgtcctatgggccagttgcctaccacctggctgccaccctcagcattgtggccaaccctcttgcctcgttggtctccatgttcctgcctaacaggtctctgctgttcctgggggtcctctccgtgcttgggacctgctttgggggctacaacatggccatggcggtgatgagcccctgccccctcttgcagggccactggggtggggaagtcctcattgtggcctcgtgggtgcttttcagcggctgcctcagctacgtcaaggtgatgctgggcgtggtcctgcgcgacctcagccgcagcgccctcttgtggtgcggggcggcggtgcagctgggctcgctgctcggagcgctgctcatgttccctctggtcaacgtgctgcggctcttctcgtccgcggacttctgcaatctgcactgtccagcctaggcaggccgccgaccccgcccccatcgctcacggacggaactggggtccagagaggccaggtcacagagcaaggggcaggaacagagagacagagcctgagtaattgaatcatgaacgcaagtgcccactggggactgtggggaagatggcacctggaaatgcaaggtgcggctctatccccaactctgtgtcacactacctgtgacgaccagctcagatctcctttgctttg

SEQ ID NO: 74 - protein, 469 aa, Homo Sapiens
MAFLMHLLVCVFGMGSWVTINGLWVELPLLVMELPEGWYLPSYLTVVIQLANIGPLLVTLLHHFRPSCLSEVPIIFTLLGVGTVTCIIFAFLWNMTSWVLDGHHSIAFLVLTFFLALVDCTSSVTFLPFMSRLPTYYLTTFFVGEGLSGLLPALVALAQGSGLTTCVNVTEISDSVPSPVPTRETDIAQGVPRALVSALPGMEAPLSHLESRYLPAHFSPLVFFLLLSIMMACCLVAFFVLQRQPRCWEASVEDLLNDQVTLHSIRPREENDLGPAGTVDSSQGQGYLEEKAAPCCPAHLAFIYTLVAFVNALTNGMLPSVQTYSCLSYGPVAYHLAATLSIVANPLASLVSMFLPNRSLLFLGVLSVLGTCFGGYNMAMAVMSPCPLLQGHWGGEVLIVASWVLFSGCLSYVKVMLGVVLRDLSRSALLWCGAAVQLGSLLGALLMFPLVNVLRLFSSADFCNLHCPA

SEQ ID NO: 75 - DNA, 3624 bp, Homo Sapiens
  CDS (339)...(1364)
tagtctaactcgcggctgtcaccgccactgcagcggagccggccggccgggcgctgcgggacgggcgggcggctgccggcaggaggcgccgagccgggtgactgccgcggcgggcacagtccggggccacagcgccgagcccgggcgggagtggccccgcgcaggcagggagcggcgccgcgcactccaacccggcgggcacctcgggggcgggcgcggggcgcagccttctcgtcccggcctctgtgacaagcgccccggagccgggagcccgattgccgggctcggggtgggcgcggacgcaggcactgggctcgtgcggggccccgggcgtcgcgatgaacatcgtggtggagttcttcgtggtcactttcaaagtgctctgggcgttcgtgctggccgcggcgcgctggctggtgcggcccaaggagaagagcgtggcgggccaggtgtgcctcatcaccggcgccggcagcggcctgggccgcctcttcgcgctggagttcgcccggcgtcgggcgctgctggtgctgtgggacatcaacacgcaaagcaacgaggagacggctggcatggtgcgccacatctaccgcgacctggaggcggccgacgccgctgcgctgcaagctgggaatggtgaggaagaaattctgccccactgtaacttgcaggtttttacctacacctgtgacgtggggaagagggagaacgtctacctgacggctgaaagagtccgcaaggaggttggcgaagtctcagtcctggtcaataatgctggtgtggtctctgggcatcaccttctggaatgtcctgatgagctcattgagagaaccatgatggtcaattgccatgcacacttctggaccactaaggcttttcttcctacgatgctggagattaatcatggtcatattgtgacagttgcaagttccttgggattgttcagtactgccggagttgaggattactgtgccagtaaatttggagttgtgggttttcatgaatccctgagccatgaactaaaggctgctgaaaaggatggaattaaaacaaccttggtttgcccttatcttgtagacactggcatgttcagaggctgccgaatcaggaaagaaattgagccttttctgccacctctgaagcctgattactgtgtgaagcaggccatgaaggccatcctcactgaccagcccatgatctgcactccccgcctcatgtacatcgtgaccttcatgaagagcatcctaccatttgaagcagttgtgtgcatgtatcggttcctaggagcggacaagtgtatgtacccctttattgctcaaagaaagcaagccacaaacaataatgaagcaaaaaatggaatctaagaatctttttgtatggaatattacttctatcagaagatgatcaagatgtttcagtccagtgcacatcagcattgctgacattttatggattctaaacttgtgttgtttcttttttaaatcaactttttaaaaaaataaagtgtaaattaaccgactagagtacttggaaaatgtgatcagtacaagtgaacttaggttgttgccaacagggtccttttaggcagaacccagaaaccagtcaaatctgtagagaagcagtgtgacatcttcaggttaccattattttttaatgagcaggaagtctagaaatgataactagactgtatgtttcatgtgtgtgatttttcagaattcccagagtttactcattcttgttattaaactctagccagttgacatcttcgcaatttcaaggactgatagtgctgtattttctcacgttttctaagtttccgttttgcaaggcctaggtgactttttcatggtgtttgtatgtttagctcttttgaaaaggaattttgaaatctccatcaactgaagtaaatgatgtctgagtgttacagtwaaggtgaccaagtctctttcttaaagtcacaatgactaaagtattagttgaatttttttttttttttttgatggagtctcgctctgtcaccaggctggagtgcagtagcacaatcacggctcactgcaatctctgcctcccrgtttcaagtgattctgctgtctcagcctcccaagtagctgggactacaggcatgcgccaccacgcccagctaatttttgtatttttagtagagacggggtttcaccatgttggtcaggatggtctccatctcttgacattgtgatccacctgcctcggcctcccaaagtgctgggattacaggcatgagccactgcacccagccttgaatttttaattttatctctgatatacttcattaagtgtctggagacctaattatcctaaaagatcatacattttctacctatgaattttgctgcatacagaaagtgccctttcctcaggaagttgctgtgtttcatttctttggatggactcttatctagaatacatagcagctctgcaaagaaacagtttttaaaaatgggaacttctacattgaaaagtccccatttttgtgccaactatgattagtgagaggaagaaatcttattctatggcatatgtatggaagggtgtaaagattcttttgaaaggtttattcacattgtagaacagcaaatgacatttttacagtatttttttgtaaagcaaactattttgtgccttgaatttggtatatgtgtattagtgaaacattgtaaaggtgaacttctacctctgtatctaaatgtataccatccacttgtaaatgactataaactattatgtgattgcttttttttttagaatgtcttgtttaaatagtggccaatgtttaaggctgttaaaataagccaacttttactaattggggagttttataaatgactgattaaatttaaagaattaacttacatgcaattgtgtgattattagttatcagcagtgttgtaaggaaaattattgtgtttttttttatgatcattatcccactttaggtaaagaaaaatattggaatggaatagtgttgggaaacagacattaacaacctagggtgcctgcactcaaatagccgatgttactgtccctagattagagacttgattaagggcttgtttgtaccaaaagtggggaaacaatgccatgacctgtgttttagtttggctgcaccacagatcaaatctgcactgtgtctacatataggaaaggtcctggtgtgtgctaatgttcccaatgcaggacttgaggaagagctctgttatatgtttccatttctctttatcaaagataaccaaaccttatggcccttataacaatggaggcactggctgcctcttaattttcaatcatggacctaaagaagtactctgaagggtctcaacaatgccaggtggggacagatatactcagagattatccaggtctgcctcccagcgagcctggagtacaccagaccctcctagagaaatctgttataatttaacaacccacttatccaccttaaaactgaggaaagtcgtctttacatctaattttattcttgtgtgttataacttaaacctatttctatttttgtttgttattgcccttataagggtgtccatctccaagttcaataaactaattcatttaaaaaaaaaaaaaaaaaaa

SEQ ID NO: 76 - protein, 341 aa, Homo Sapiens
MNIVVEFFVVTFKVLWAFVLAAARWLVRPKEKSVAGQVCLITGAGSGLGRLFALEFARRRALLVLWDINTQSNEETAGMVRHIYRDLEAADAAALQAGNGEEEILPHCNLQVFTYTCDVGKRENVYLTAERVRKEVGEVSVLVNNAGVVSGHHLLECPDELIERTMMVNCHAHFWTTKAFLPTMLEINHGHIVTVASSLGLFSTAGVEDYCASKFGVVGFHESLSHELKAAEKDGIKTTLVCPYLVDTGMFRGCRIRKEIEPFLPPLKPDYCVKQAMKAILTDQPMICTPRLMYIVTFMKSILPFEAVVCMYRFLGADKCMYPFIAQRKQATNNNEAKNGI

SEQ ID NO: 77 - DNA, 1808 bp, Homo Sapiens
  CDS (285)...(1418)
ggagtcgacccacgcgtccgggagcagcggccggggcggcagcggtccccaggccgggacacccggggtggtgcgcccgggttcgcgggggctgcgccggcgccggggaggcggggggagcgggagcgggcgacgcggggaaggggggagccagggggagggcgccggccggaggaggggcggacccgccgccctagccgagcagagcacagccgagccgagcggcccgggcgggggccgaccccggccagcgtcggcgcagagagcgggcggaggcgcaggccatgctgcggctggtgcccaccggggcccgggccatcgtggacatgtcgtacgcccgccacttcctggacttccagggctccgccattccccaagccatgcagaagctggtggtgacccggctgagccccaacttccgcgaggccgtcaccctgagccgggactgcccggtgccgctccccggggacggagacctcctcgtccggaaccgatttgttggtgttaacgcatctgacatcaactattcagcaggccgctatgacccctcagttaagcctccctttgacataggtttcgaaggcattggggaggtggtggccctaggcctctctgctagtgccagatacacagttggccaagctgtggcttacatggcacctggttcttttgctgagtacacagttgtgcctgccagcattgcaactccagtgccctcagtgaaacccgagtatcttaccctgctggtaagtggcaccaccgcatacatcagcctgaaagagctcggaggactgtcggaagggaaaaaagttttggtgacagcagcagctgggggaacgggccagtttgccatgcagctttcaaagaaggcaaagtgccatgtaattggaacctgctcttctgatgaaaagtctgcttttctgaaatctcttggctgtgatcgtcctatcaactataaaactgaacccgtaggtaccgtccttaagcaggagtaccctgaaggtgtcgatgtggtctatgaatctgttgggggagccatgtttgacttggctgtagacgccctggctacgaaagggcgcttgatagtaatagggtttatctctggctaccaaactcctactggcctttcgcctgtgaaagcaggaacattgccagccaaactgctcaagaaatctgccagcgtacagggcttcttcctgaaccattacctttctaagtatcaagcagccatgagccacttgctcgagatgtgtgtgagcggagacctggtttgtgaggtggaccttggagatctgtctccagagggcaggtttactggcctggagtccatattccgtgctgtcaattatatgtacatgggaaaaaacactggaaaaattgtagttgaattacctcactctgtcaacagtaagctgtaaaaacagaacaatgacataaatcaagggagaaagaaaatgggcactttatgtctcagaattactcaaatcaatttatttttagttggtaatggatataatatttcttaaaacaaaagtaaggtgttaatgaataggtctctccttctcctcctcctcctcctcttcccttgggggaaaaaaaaaaatgtgctaataaaacttccctccatggctaagagggaaaacgcttacattcaattctttagtcatggatggtctcgttccagatgttattgttccagggaactaaattcattcctgatgccagatctgatcgagkcagtatgtcttcagcttggatcaggattttaaaatcagttttgaaagtgggttcccgacttctttggcttt

SEQ ID NO: 78 - protein, 377 aa, Homo Sapiens
MLRLVPTGARAIVDMSYARHFLDFQGSAIPQAMQKLVVTRLSPNFREAVTLSRDCPVPLPGDGDLLVRNRFVGVNASDINYSAGRYDPSVKPPFDIGFEGIGEVVALGLSASARYTVGQAVAYMAPGSFAEYTVVPASIATPVPSVKPEYLTLLVSGTTAYISLKELGGLSEGKKVLVTAAAGGTGQFAMQLSKKAKCHVIGTCSSDEKSAFLKSLGCDRPINYKTEPVGTVLKQEYPEGVDVVYESVGGAMFDLAVDALATKGRLIVIGFISGYQTPTGLSPVKAGTLPAKLLKKSASVQGFFLNHYLSKYQAAMSHLLEMCVSGDLVCEVDLGDLSPEGRFTGLESIFRAVNYMYMGKNTGKIVVELPHSVNSKL

SEQ ID NO: 79 - DNA, 5275 bp, Homo Sapiens
  CDS (37)...(2706)
cccgccttagcatgctggccgggacatctggtgaacatggcctctgctactgcggcagcagcacgacggggcctcggccgggctctccctctcctctggcgtggctaccagaccgagcggggcgtttacggctaccggccgaggaagcccgagagccgcgagccccagggcgccctggagcgccccccagttgatcatggccttgccaggttggtgacagtatattgtgagcatggtcataaagctgccaaaatcaaccccctcttcaccggacaagccctgctggagaatgtgcctgaaatccaagccctggtgcagacactgcagggacccttccacacggcaggattattgaacatggggaaggaagaggcctcacttgaggaagtgttagtctatctcaatcaaatctactgtgggcagatttctattgaaacctcccaacttcagagccaggatgagaaagactggtttgccaagcggtttgaggaactgcaaaaggagacgtttaccacagaagagcgaaaacatctgtcgaaactaatgctggaatctcaggagtttgaccactttctggccaccaagttctcgacagtgaagcgatatggaggcgaaggggctgaaagcatgatgggctttttccacgagctgctgaaaatgtcggcctacagcgggatcactgatgtcattattgggatgccccatagagggaggctgaatttattgacaggccttctgcagttccctccagagctgatgttccgtaaaatgcgaggcttaagtgaatttccagagaatttctcagccactggagacgtcctgtctcacctgacctcctctgtggacctggactttggggcgcaccatcccctccatgtgacaatgttgcccaatccctcgcacctggaggccgtcaaccccgtggccgtgggcaaaactcgcggcaggcagcagtctcgccaagacggcgattactctccagacaactcagcccagccgggggacagggtcatttgcttacaggtccatggtgatgcttctttctgtggtcaagggattgttcctgaaacattcacgctgtccaatctcccacatttcagaattggtgggagtgtgcatttgattgttaataaccagctgggttacaccactccagctgaaagaggaaggtcttctttatactgcagtgatattgggaagcttgtgggctgtgccatcatccatgtcaatggagacagcccagaggaagtggtccgtgccacacgactggcttttgaataccaacgccagttccgcaaggatgtgattattgatctgttgtgctacaggcagtggggccacaatgagctggatgagccattctacaccaaccccatcatgtacaaaatcatcagagctcgaaagagcattccagacacatatgcagagcacctcattgctggcggactcatgacgcaggaggaggtgtctgaaataaaatcctcctactatgccaagttgaatgatcacttaaataacatggcccactacaggccccctgccctgaacctgcaggcccactggcagggcctggctcagccagaagcgcaaatcactacctggagtacaggtgtgcccctcgacctcctgcggtttgttggcatgaagtctgtagaggtgccaagagagctgcagatgcacagtcacctgctgaagacacatgttcagtccagaatggagaagatgatggacggaatcaagctagactgggccaccgcggaagctcttgccttgggttctttacttgctcaaggttttaatgttcgtctaagtggccaagatgttggtcgtggaactttcagtcagaggcatgcaatggtggtttgccaggagacggatgacacctacatccccctgaaccatatggacccaaatcagaaggggtttctagaggtcagcaacagccccctgtcagaagaggccgtcctgggattcgaatatgggatgagcattgagagcccaaagttactgcccctgtgggaggcacagtttggcgatttcttcaatggtgcccagatcatctttgacacattcatctctggaggagaggccaagtggctcctacaaagcggcattgtcatcctccttccacatggctacgatggggctgggccagaccactcatcctgtcgaatagagcgtttcctgcagatgtgtgacagtgcggaagagggggtggacggagacactgtgaacatgtttgtggttcacccaacaactcctgcacagtatttccacttgcttaggagacagatggtccggaacttcagaaaaccactcattgttgcttcccctaagatgttactcaggctcccggcagccgtgtcaactcttcaagaaatggcaccaggaacaacatttaacccggtcattggtgattcatctgtggatccaaaaaaggttaagaccctcgtgttctgctccggcaaacatttctactccctggtgaaacaaagagaatctctgggggccaagaagcatgactttgccatcatccgagtagaggaactctgccccttcccgttggattctttacagcaagagatgagcaaatacaaacatgttaaagatcatatttggagtcaggaggaacctcagaacatgggtccgtggtcgtttgtttctccaaggtttgaaaagcagctggcctgcaagtcaaatttttagaagttatcaaaccattctgtgcagttctaccagaaattcagaaaccggaaaggaaaatccagtttagagagaaggttctgtggactgctataacgctcttcattttcttagtgtgttgtcagatcccactgtttggaatcatgtcatcagattctgcagatcctttctactggatgagagttattctggcttccaatagaggaactttaatggaattgggtatctccccaattgtaacatctggtttgattatgcagttgttagctggagccaaaatcattgaagttggagatacaccgaaagatagagctttattcaatggagcccagaaactgtttggtatgatcattaccattgggcaagccattgtgtatgtcatgacggggatgtatggggaccctgcagaaatgggtgccggaatctgtctcctgatcatcattcaggtaagaaatcctatattttcctatgcagataacaaaacagtttgattcctttttccttttctaacagttctttaggtgattggcttattcattttcttacttttgaattatttaattctagtattttgatcactgaagtgatacgtgtaaaatttttttaaaaccttctgtcaccgtgacgtgttcaagttgtgttgacgtgaaaaattcaaatttattctaatagcttcataactgcacaatacaaagaattatggatcaattgtattttattgattcttaagatacacatttgtcacattttgatgtctctagaatcaggatgtttttgtacagtaaacagtgccttccacttgcggtctgccaggaggcagtcatggtggtgtcactgcctgtgcgtgtgtcagcctgttcaggtcatgctgaccttagttggctgagtgtgatcttcacagaatgggtgtttgagttcaatcgctgtctaaaggtgttcagaaaatctgttgtgatttgttattgaaatgaaagtttatgtatagaagggcaagctagatgataaatatctaccactaggtctaaaatacgtttttgtaagtagaaaattaaaattctttgcaataaggtattgtgccataagttaattggcagtattcttttcttagtagtacacaaaataatgatgttttacatggtaatgtcttagagtcagtgaaacactgtttatacacacataaatatattccatgggttttttaaatggatgcttaggaatggaatttttaaaggtcaacataattattagtgtcctaagtatctttttttttttttttttgagacggagtctcactctgtactccagcctgcgtgacagagcgagactccgtctcagaaaaaaaaaaaaagaacataatatgtgtattgtgtctcatgtacactgttgaagaggtagcagcccatgattgatgaaatagtccagtgatcttatgagatacaagtttgttttcatgttctctctctgacattgtctatgcttagttattgtgttcatgcttattccttcatggtccaagttggctgtcccacctccaggcatcaaaccacattccaaacagcaaccaggaggaaatagtaagctgataggtcatggggaattaggttggaagccattgctttttaatttacagaagtccattctccccaggcacttctttctaagtctcattgatcagaactcaaccacgtggccaccatcagcagaaacatctctctgtagcaccgtgaaacacatgagaacataactggggatgaccgttgttacttgaactattttgaaagatctgacataaaggtcatcgccttgtgcacttcaatgggtgttactgcaaaactcccagggctaggcatggcgacatacacccgaaatctcagctatctgggaggctgaggtgggaggattgcttgagcccacgagtttgaggctgaagtgtgcctgtgaatagctactgcactccagtgcctaggacacatagggagacctcacttttttatggctgcatagtattccatggtaaagaaatgtaccacattttctttatccacttcactgttgatgggcatttatccacttcactgttggtgggaatttaggttgaatccatgtctttgctattgaagtcacactttttaatcaagttatttaactttcctgtgttcatttgtgttatataccagaacatttttatttctatggttttaatgccacctaatatgattatcaatgtgtcattctccataaatcattgtgttatacatgttaaacgattaggtattaagtgtataggtataaatcacttagaataatgactaacacattgtatgaactaaataagtactgattcatctgattcatcaaatttccattattcataccattcattatttattaagtggtgtagtatttgttcttatcaacatttgcttttctgtcctatctaaatattaatgaaacagtggatgtgggctcagtgtgctgtcttgaaataatccaaagtcaaatggcatgcttcactggtttcctttagatgcaataactcatttgactcacacaataaaaatgagtattaagt

SEQ ID NO: 80 - protein, 889 aa, Homo Sapiens
MASATAAAARRGLGRALPLLWRGYQTERGVYGYRPRKPESREPQGALERPPVDHGLARLVTVYCEHGHKAAKINPLFTGQALLENVPEIQALVQTLQGPFHTAGLLNMGKEEASLEEVLVYLNQIYCGQISIETSQLQSQDEKDWFAKRFEELQKETFTTEERKHLSKLMLESQEFDHFLATKFSTVKRYGGEGAESMMGFFHELLKMSAYSGITDVIIGMPHRGRLNLLTGLLQFPPELMFRKMRGLSEFPENFSATGDVLSHLTSSVDLDFGAHHPLHVTMLPNPSHLEAVNPVAVGKTRGRQQSRQDGDYSPDNSAQPGDRVICLQVHGDASFCGQGIVPETFTLSNLPHFRIGGSVHLIVNNQLGYTTPAERGRSSLYCSDIGKLVGCAIIHVNGDSPEEVVRATRLAFEYQRQFRKDVIIDLLCYRQWGHNELDEPFYTNPIMYKIIRARKSIPDTYAEHLIAGGLMTQEEVSEIKSSYYAKLNDHLNNMAHYRPPALNLQAHWQGLAQPEAQITTWSTGVPLDLLRFVGMKSVEVPRELQMHSHLLKTHVQSRMEKMMDGIKLDWATAEALALGSLLAQGFNVRLSGQDVGRGTFSQRHAMVVCQETDDTYIPLNHMDPNQKGFLEVSNSPLSEEAVLGFEYGMSIESPKLLPLWEAQFGDFFNGAQIIFDTFISGGEAKWLLQSGIVILLPHGYDGAGPDHSSCRIERFLQMCDSAEEGVDGDTVNMFVVHPTTPAQYFHLLRRQMVRNFRKPLIVASPKMLLRLPAAVSTLQEMAPGTTFNPVIGDSSVDPKKVKTLVFCSGKHFYSLVKQRESLGAKKHDFAIIRVEELCPFPLDSLQQEMSKYKHVKDHIWSQEEPQNMGPWSFVSPRFEKQLACKSNF

SEQ ID NO: 81 - DNA, 3622 bp, Homo Sapiens
  CDS (6)...(3038)
cccgaatgagtcagctgaggctgctgccgtcccgtcttggggtacaggctgcgaggctcctggctgcacatgacgtcccggtgtttggctggcgcagcaggtcctccgggccaccggccaccttcccaagcagcaaaggtggaggcggctccagttacatggaggagatgtacttcgcctggttggaaaacccccagagtgtccacaagtcctgggacagcttcttcagggaagccagcgaggaagccttttctggctctgctcagccacggcccccttctgttgtccatgagagcaggtctgcagtctcaagtcggaccaagaccagcaaattggtggaggaccacctggctgtgcagtccctgatccgggcctaccagatccggggtcaccatgtggcccagctggaccccctgggcattctggatgcagacctggactcctttgtgccctcagacttgatcacaaccattgataaactggccttctatgaccttcaggaggctgaccttgataaggagttccagctgccgacaaccaccttcattgggggctctgaaaacaccctttctctgcgggagatcattcggcgcctggagaacacctactgccagcacattggcctggagttcatgttcatcaacgatgtggagcagtgccagtggatccggcagaagtttgagacccctggtgtgatgcagttctccagcgaggagaagcggaccctgctggcccggctagtgcgctccatgaggtttgaagacttcctggcccggaaatggtcctcagagaagcggtttggcctggagggctgtgaagtgatgattcctgccctcaagaccatcatcgacaaatccagcgagatggggattgagaatgtcatcttggggatgccacacaggggaaggctgaacgtgctggccaacgtgatccgcaaggacctggagcagatcttctgccagtttgaccccaagctggaggcggcggacgagggctccggggatgtcaagtaccacctgggcatgtaccatgagaggatcaaccgcgtcaccaaccggaacatcactctgtcgctggttgccaacccctcccacctggaggcagtggaccctgtggtgcaggggaagacaaaggcagagcagttctaccgtggagatgcccagggcaagaaggtcatgtccatcctggttcatggggacgccgcctttgctggccagggcgtggtatatgagaccttccacctgagcgacctgccctcctacacgaccaatggtaccgtgcacgtcgtcgtcaacaaccagattggattcaccacagacccccgaatggcccgctcctcaccatacccgaccgacgtggcccgggtggtcaatgcgcctatcttccatgtgaatgccgatgacccagaggctgtgatatatgtgtgcagtgtggcagccgaatggagaaacactttcaacaaagatgttgtcgtggacctggtctgttaccgccggcgtggccacaatgagatggacgagcccatgttcacccagccgctcatgtacaagcagatccacagacaggtgcctgtgctgaagaagtacgcagacaagctgattgccgagggcacagtcaccctgcaggagtttgaggaagaaattgccaaatacgaccggatctgtgaggaggcttatggcaggtccaaggataaaaagattctgcatataaagcactggttggactccccctggcctggcttcttcaacgtagatggggagcccaagagcatgacatgcccagccacggggatccctgaggacatgctcacccacatcggcagtgtggccagctctgtgcccctggaggactttaagatccacactggcctctctcgcattctgcggggccgtgcggacatgaccaagaaccggacggtggactgggcgttggcagagtacatggcctttggctccctgctgaaggaaggcatccacgtgcggctcagcgggcaggatgtggagaggggcacattcagtcaccggcaccatgttctccatgaccaggaggttgaccgcaggacgtgtgtgcctatgaatcatctctggcctgaccaggccccgtacaccgtgtgcaacagctccctctcggagtacggagtcctgggctttgagctgggctatgccatggccagccccaatgccctggtcctctgggaggcccagtttggggacttccacaacacggcccagtgcatcatcgaccagttcatcagcaccggccaggccaagtgggtgcggcataatggcattgtgctgctgctgccccatggcatggaaggcatgggcccagagcactcgtcagcgaggcccgaaaggttcctgcagatgagcaatgatgactcggatgcctaccctgcattcaccaaggacttcgaggtgagccagctctatgactgcaactggatcgtggtcaactgctccacaccggccaactacttccacgtgctgcgccggcagatcctgctgcccttccgcaagccgctgattatcttcacacctaaatctctgctgaggcacccagaggccaagtccagctttgaccaaatggtatccgggaccagcttccagcgggtgattcctgaagatggggccgcagcacgggcccctgagcaggtgcagcggctcatcttctgcacgggaaaggtgtactatgacctggtgaaggagcggagcagccaggacctggaggagaaagtggccatcacgcgcctggagcagatctctccattccccttcgacctgatcaagcaggaggcagagaagtacccaggtgcggagctggcctggtgtcaggaggagcacaagaacatgggctactatgactacatcagcccacgcttcatgaccatcctgaggcgcgcacggcccatatggtatgttggccgggacccagcggctgcaccagccacaggaaacaggaacactcacctggtgtcactgaagaagtttctggatactgccttcaatctccaggcctttgagggcaagacattttagagctgggcaaaacctgtgtaggtctcgctgtgggtttgctggggaccaagggggtgatgaaaaggggaggggcggagctcctgcccaggagaggggctgtggggccccaggataaaacagacacagtgacagggccaagagccagcactgctggccttggtgtcatgccagaatctaccaggactgagggagccagaggagtcctataggcaggctactgtgctggagcatcccccagctgctcccatcttgctggaatttcttgggcggcttctccacctgtatctcaagacagacacccgggggcctgtgtctgtggccgctcccatcccggcagccctggctgctgctcgccccaccctcgcttatctgtagattcaaagcgatgttctcttctgtgctcttagaagtagggagttcagcagtaacagccaggtgaagcgaacctgctgggtgatttgtttgcgctctgttttatggggcattcctgcgagatgtgtcagcttctgtatgaaatgcagccacagctcatgtgtaccaaagtagaaaaccaaatcacagagaaataaaaacatgcttcagag

SEQ ID NO: 82 - protein, 1010 aa, Homo Sapiens
MSQLRLLPSRLGVQAARLLAAHDVPVFGWRSRSSGPPATFPSSKGGGGSSYMEEMYFAWLENPQSVHKSWDSFFREASEEAFSGSAQPRPPSVVHESRSAVSSRTKTSKLVEDHLAVQSLIRAYQIRGHHVAQLDPLGILDADLDSFVPSDLITTIDKLAFYDLQEADLDKEFQLPTTTFIGGSENTLSLREIIRRLENTYCQHIGLEFMFINDVEQCQWIRQKFETPGVMQFSSEEKRTLLARLVRSMRFEDFLARKWSSEKRFGLEGCEVMIPALKTIIDKSSEMGIENVILGMPHRGRLNVLANVIRKDLEQIFCQFDPKLEAADEGSGDVKYHLGMYHERINRVTNRNITLSLVANPSHLEAVDPVVQGKTKAEQFYRGDAQGKKVMSILVHGDAAFAGQGVVYETFHLSDLPSYTTNGTVHVVVNNQIGFTTDPRMARSSPYPTDVARVVNAPIFHVNADDPEAVIYVCSVAAEWRNTFNKDVVVDLVCYRRRGHNEMDEPMFTQPLMYKQIHRQVPVLKKYADKLIAEGTVTLQEFEEEIAKYDRICEEAYGRSKDKKILHIKHWLDSPWPGFFNVDGEPKSMTCPATGIPEDMLTHIGSVASSVPLEDFKIHTGLSRILRGRADMTKNRTVDWALAEYMAFGSLLKEGIHVRLSGQDVERGTFSHRHHVLHDQEVDRRTCVPMNHLWPDQAPYTVCNSSLSEYGVLGFELGYAMASPNALVLWEAQFGDFHNTAQCIIDQFISTGQAKWVRHNGIVLLLPHGMEGMGPEHSSARPERFLQMSNDDSDAYPAFTKDFEVSQLYDCNWIVVNCSTPANYFHVLRRQILLPFRKPLIIFTPKSLLRHPEAKSSFDQMVSGTSFQRVIPEDGAAARAPEQVQRLIFCTGKVYYDLVKERSSQDLEEKVAITRLEQISPFPFDLIKQEAEKYPGAELAWCQEEHKNMGYYDYISPRFMTILRRARPIWYVGRDPAAAPATGNRNTHLVSLKKFLDTAFNLQAFEGKTF

SEQ ID NO: 83 - DNA, 3030 bp, Homo Sapiens
  CDS (238)...(2580)
ggagaattgaaacccgaacacacattgggctcttttggcacttgactagagctaaaacctcgggattcagcgggcaagcgttgctcagcaacggcgcgtaggctgtgtgcggttggctggagccagaccccaccccggcctcggcccatgctctagaggggacgttgccccaatcctgaaggacttcggcactcgagacctgtggatgccgcgttgctgtggcctgcgggggtgatcatgaagccaggtgctactggcgagtccgatttggccgaagtgctgccccagcacaagttcgacagcaagtccctggaggcctacctaaaccagcacttgtctggctttggggccgaacgtgaggctacgctgaccattgcccagtacagagcaggaaagtccaatccaaccttttatctccagaagggctttcaaacatatgtgctcaggaaaaaaccaccaggttcacttcttcctaaagcacatcagattgatagagaatttaaagtccagaaagccttgttttcaattggattccccgttcccaagcctatactgtactgcagtgatacttctgtcattggaacagaattttacgtaatggaacatgtgcagggtcgaatcttccgtgatttaacaattcctggacttagcccagcagaacgttcagccatatatgtggccacggtagaaacattggctcagttacattccttgaatatacagtcactgcagctggaaggatatggtataggtgctgggtactgcaaaagacaggtatcaacctggacaaagcaatatcaagctgcagctcatcaggacatccctgccatgcaacagctatcggagtggctaatgaagaacttgcccgataatgacaatgaagagaatttgattcatggagatttcagactagataacatagttttccaccctaaagagtgtcgagttatagcagtgctggattgggagctgtcaaccattggtcatcctttgtcagacttagctcatttttccctgttctacttttggccaaggacagttccaatgataaatcaaggttcttatagtgaaaactcagggataccatcaatggaagaactgatttcaatatattgccgctgcaggggaattaattctattcttcctaactggaatttctttcttgccctttcatattttaagatggctggaatagcacagggagtatatagcagatatcttctgggaaataattcatctgaggatagctttttatttgccaatattgtgcaacctctggcagaaactggactacaactctccaaacgaactttcagtactgtactaccacagattgatactactggacagttgtttgtacagactcggaaaggtcaggaagttcttattaaggtgaagcatttcatgaaacaacacattcttccagctgaaaaggaggtaactgagttctatgttcaaaatgaaaattcagtggacaagtggggaaaacctttagtgattgataaactcaaggaaatggccaaagtcgagggtctctggaacttgtttttgccagctgtcagcggactcagccacgtggactatgccttgattgctgaagaaacaggaaaatgcttttttgctccagatgtctttaactgccaagcaccagacacagggaatatggaggttctgcacctgtatggaagtgaggaacagaagaaacagtggcttgagcctcttcttcaagggaacattacctcttgcttctgtatgacagaacctgatgtagcttcaagtgatgccacgaatattgaatgcagcatccaacgagatgaagatagctatgtaattaacggcaaaaaatggtggagcagtggagctgggaatcccaagtgcaaaattgcaattgttttgggaagaactcaaaatacttctctctccagacacaaacagcacagcatgattcttgttcccatgaacacacctggagtaaaaataataaggcctttgtcagtttttggctacacagataattttcatggaggacattttgagatccattttaatcaagtgcgagttcctgccacaaatctaatactaggtgaaggtaggggatttgaaatttcccaaggccgccttggacctggcagaatccaccactgtatgagaacagtaggtttggcggaacgcgctttgcagatcatgtgtgagcgggcaacacaaaggatagctttcaagaagaagttgtatgcacatgaggttgtggctcactggattgctgaaagccgcattgccattgagaagatccgcttgttgactctgaaagctgctcacagcatggacactctgggcagtgctggcgctaagaaagagattgcaatgatcaaagtggctgccccacgggctgtcagcaaaatcgttgactgggccatccaggtgtgcggaggtgctggtgtttcccaggattaccctctggctaacatgtatgctataacccgagttttgcgtttagcagatggacctgacgaagttcatctttcagcaatcgcaacaatggagctgcgggaccaagccaaaagactgacagccaagatataaggagggtggcactgccacatcccactggcagaaactctcctttatacaaacttcattggctccaacatttgaatctcatatttttgtagcagtttgagcacagggttaattattcatttgtggtaaagattatagcatctattttgatcagtgggttttattatttcaagggtcacacagggttaagttcagtaagaaatgctgtagctgttgtcattcaatctagtgcctccttgaggccaggagttcaggaccagcctgggcaacatagcgagacccccattgctacaaaaaatttaaaaatgaaacaagtgtggtggcacatgcttgtagtcctagctacttgggaggctgaggcaggaggattgcttgagtctaggagtttgaggttacagtaagctgtgatcgtgacatggcctccagcctgggtgaccgagtgagactgtttct

SEQ ID NO: 84 - protein, 780 aa, Homo Sapiens
MKPGATGESDLAEVLPQHKFDSKSLEAYLNQHLSGFGAEREATLTIAQYRAGKSNPTFYLQKGFQTYVLRKKPPGSLLPKAHQIDREFKVQKALFSIGFPVPKPILYCSDTSVIGTEFYVMEHVQGRIFRDLTIPGLSPAERSAIYVATVETLAQLHSLNIQSLQLEGYGIGAGYCKRQVSTWTKQYQAAAHQDIPAMQQLSEWLMKNLPDNDNEENLIHGDFRLDNIVFHPKECRVIAVLDWELSTIGHPLSDLAHFSLFYFWPRTVPMINQGSYSENSGIPSMEELISIYCRCRGINSILPNWNFFLALSYFKMAGIAQGVYSRYLLGNNSSEDSFLFANIVQPLAETGLQLSKRTFSTVLPQIDTTGQLFVQTRKGQEVLIKVKHFMKQHILPAEKEVTEFYVQNENSVDKWGKPLVIDKLKEMAKVEGLWNLFLPAVSGLSHVDYALIAEETGKCFFAPDVFNCQAPDTGNMEVLHLYGSEEQKKQWLEPLLQGNITSCFCMTEPDVASSDATNIECSIQRDEDSYVINGKKWWSSGAGNPKCKIAIVLGRTQNTSLSRHKQHSMILVPMNTPGVKIIRPLSVFGYTDNFHGGHFEIHFNQVRVPATNLILGEGRGFEISQGRLGPGRIHHCMRTVGLAERALQIMCERATQRIAFKKKLYAHEVVAHWIAESRIAIEKIRLLTLKAAHSMDTLGSAGAKKEIAMIKVAAPRAVSKIVDWAIQVCGGAGVSQDYPLANMYAITRVLRLADGPDEVHLSAIATMELRDQAKRLTAKI

SEQ ID NO: 85 - DNA, 2404 bp, Homo Sapiens
  CDS (97)...(2217)
gcaacccggaaggtccggcgtcccagccgcctacctcgctgggaccctggtcttgctgtcccccgctggcctcctgcccaagcgactgcggccaggatgggccggaaggtgaccgtggccacctgcgcactcaaccagtgggccctggacttcgagggcaatttgcaaagaattttaaagagtattgaaattgccaaaaacagaggagcaagatacaggcttggaccagagctggaaatatgcggctacggatgttgggatcattattacgagtcggacaccctcttgcactcgtttcaagtcctagcggcccttgtggagtctcccgtcactcaggacatcatctgcgacgtggggatgcctgtaatgcaccgaaacgtccgctacaactgcagagtgatattcctcaacaggaagatcctgctcatcagacccaagatggccttggccaatgaaggcaactaccgcgagctgcgctggttcaccccgtggtcgaggagtcggcacacagaggagtactttctgcctcggatgatacaggacctgacaaagcaggaaaccgtacccttcggagatgcggtgctggtgacatgggacacctgcattggaagtgagatctgtgaggagctctggacaccccacagcccgcacatcgacatgggcctggatggcgtggagatcatcaccaacgcctcgggcagccaccacgtgctgcgcaaagccaacaccagggtggatctcgtgactatggtcaccagcaagaacggtgggatttacttgctggccaaccagaagggttgcgacggggaccgcctgtactacgacggctgtgccatgatcgccatgaacggaagcgtctttgctcaaggatcccagttttctctggatgacgtggaagtcctgacggccacgctggatctggaggacgtccggagctacagggcggagatttcatctcgaaacctggcggccagcagggcgagcccctaccccagagtgaaggtggactttgccctctcgtgccacgaggacttgctggcacccatctctgagcccatcgagtggaaataccacagccctgaggaggagataagccttggacctgcctgctggctctgggattttttaagacgaagtcaacaggcagggtttttgctgcccttgagtggcggggtggacagcgcagccaccgcctgcctcatctactccatgtgctgccaggtctgcgaggccgtgaggagtggaaatgaggaagtgctggctgatgtccgcaccatcgtgaaccagatcagctacaccccccaggatccccgagacctctgtggacgcatactgaccacctgctacatggccagcaagaactcctcccaggagacgtgcacccgggccagagagttggcccagcagattggaagccaccacatcagtctcaacatcgatccagccgtgaaggccgtcatgggcatcttcagcctggtgacggggaagagccctctgtttgcagctcatggaggaagcagcagggaaaacctggcgctgcaaaatgtgcaggctcgaatacggatggtcctcgcctatctgtttgctcagttgagcctctggtctcggggtgtccacggtgggctcctcgtgctgggatccgccaacgtggatgagagtctcctgggctacctgaccaagtacgactgctccagtgcggacatcaaccccataggcgggatcagcaagacggacctcagggccttcgtccagttctgcatccagcgcttccagcttcctgccctgcagagcatcctgttggcgccggccaccgcagagctggagcccttggctgatggacaggtgtcccagaccgacgaggaagatatggggatgacatatgcggagctctcggtctatgggaaactcaggaaggtggccaagatggggccctacagcatgttctgcaaactcctcggcatgtggagacacatctgcaccccgagacaggtcgctgacaaagtgaagcggtttttctccaagtactccatgaacagacacaagatgaccacgctcacacccgcgtaccacgccgagaactacagccctgaggacaacaggtttgatctgcgaccatttctgtacaacacaagctggccttggcagtttcggtgcatagaaaatcaggtgctacagctcgagagggcagagccacagtccctggacggcgtggactgaggccggttccttcctggaggcctcctgtcctcggggaccccagcacctcatcatcagcattgctggagccaagggtaggagccctacactaggagcccaggatgggacggcgcatcagccgagagggagggaacttttcagtcaaattcctcaaaaagaggctggaataaagcctgggcttaaaaag

SEQ ID NO: 86 - protein, 706 aa, Homo Sapiens [sequence omitted]

SEQ ID NO: 87 - DNA, 2905 bp, Homo Sapiens
  CDS (19)...(2058)
ggccgaatacatcaagcaatggtaacatctttaaatgaagataatgaaagtgtaactgttgaatggatagaaaatggagatacaaaaggcaaagagattgacctggagagcatcttttcacttaaccctgaccttgttcctgatgaagaaattgaacccagtccagaaacacctccacctccagcatcctcagccaaagtaaacaaaattgtaaagaatcgacggactgtagcttctattaagaatgaccctccttcaagagataatagagtggttggttcagcacgtgcacggcccagtcaatttcctgaacagtcttcctctgcacaacagaatggtagtgtttcagatatatctccagttcaagctgcaaaaaaggaatttggacccccttcacgtagaaaatctaattgtgtgaaagaagtagaaaaactgcaagaaaaacgagagaaaaggagattgcaacagcaagaacttagagaaaaaagagcccaggacgttgatgctacaaacccaaattatgaaattatgtgtatgatcagagactttagaggaagtttggattatagaccattaacaacagcagatcctattgatgaacataggatatgtgtgtgtgtaagaaaacgaccactcaataaaaaagaaactcaaatgaaagatcttgatgtaatcacaattcctagtaaagatgttgtgatggtacatgaaccaaaacaaaaagtagatttaacaaggtacctagaaaaccaaacatttcgttttgattatgcctttgatgactcagctcctaatgaaatggtttacaggtttactgctaaaccactagtggaaactatatttgaaaggggaatggctacatgctttgcttatgggcagactggaagtggaaaaactcatactatgggtggtgacttttcaggaaagaaccaagattgttctaaaggaatttatgcattagcagctcgagatgtctttttaatgctaaagaagccaaactataagaagctagaacttcaagtatatgcaaccttctttgaaatttatagtggaaaggtgtttgacttgctaaacaggaaaacaaaattaagagttctagaagatggaaaacagcaggttcaagtggtgggattacaggaacgggaggtcaaatgtgttgaagatgtactgaaactcattgacataggcaacagttgcagaacatccggtcaaacatctgcaaatgcacattcatctcggagccatgcagtgtttcagattattcttagaaggaaaggaaaactacatggcaaattttctctcattgatttggctggaaatgaaagaggagctgatacttccagtgcggacaggcaaactaggcttgaaggtgctgaaattaataaaagccttttagcactcaaggagtgcatcagagccttaggtagaaataaacctcatactcctttccgtgcaagtaaactcactcaggtgttaagagattctttcataggtgaaaactctcgtacctgcatgattgccacaatctctccaggaatggcatcctgtgaaaatactcttaatacattaagatatgcaaatagggtcaaagaattgactgtagatccaactgctgctggtgatgttcgtccaataatgcaccatccaccaaaccagattgatgacttagagacacagtggggtgtggggagttcccctcagagagatgatctaaaacttctttgtgaacaaaatgaagaagaagtctctccacagttgtttactttccacgaagctgtttcacaaatggtagaaatggaagaacaagttgtagaagatcacagggcagtgttccaggaatctattcggtggttagaagatgaaaaggccctcttagagatgactgaagaagtagattatgatgtcgattcatatgctacacaacttgaagctattcttgagcaaaaaatagacattttaactgaactgcgggataaagtgaaatctttccgtgcagctctacaagaggaggaacaagccagcaagcaaatcaacccgaagagaccccgtgccctttaaaccggcatttgctgctaaaggatacccagaaccctcactactgtaacatacaacggttcagctgtaagggccatttgaaagtttggaattttaagtgtctgtggaaaatgttttgtccttcacctgaattacatttcaattttgtgaaacactcttttgtctacaaaatgcttctagtccaggaggcacaaccaagaactgggattaatgaagcattttgtttcatttacacaaatagtgatttacttttggagatccttgtcagttttattttctatttgatgaagtaagactgtggactcaatccagagccagatagtaggggaagccacagcatttccttttaactcagttcaatttttgtagtgagactgagcagttttaaatcctttgcgtgcatgcatacctcatcagtgattgtacataccttgcccactcctagagacagctgtgctcacttttcctgctttgtgccttgattaaggctactgaccctaaatttctgaagcacagccaagaaaaattacattccttgtcattgtaaattacctttgtgtgtacatttttactgtatttgagacattttttgtgtgtgactagttaattttgcaggatgtgccatatcattgaacggaactaaagtctgtgacagtggatatagctgctggaccattccatcttatatgtaaagaaatctggaattattattttaaaaccatataacatgtgattataatttttcttagcattttctttgtaaagaactacaatataaactagttggtgtataataaaaagtaatgaaattctgaagaaaaaaaaaaaaaaaaaaaaaaaaaaaaaaaaa

SEQ ID NO: 88 - protein, 679 aa, Homo Sapiens
MVTSLNEDNESVTVEWIENGDTKGKEIDLESIFSLNPDLVPDEEIEPSPETPPPPASSAKVNKIVKNRRTVASIKNDPPSRDNRVVGSARARPSQFPEQSSSAQQNGSVSDISPVQAAKKEFGPPSRRKSNCVKEVEKLQEKREKRRLQQQELREKRAQDVDATNPNYEIMCMIRDFRGSLDYRPLTTADPIDEHRICVCVRKRPLNKKETQMKDLDVITIPSKDVVMVHEPKQKVDLTRYLENQTFRFDYAFDDSAPNEMVYRFTAKPLVETIFERGMATCFAYGQTGSGKTHTMGGDFSGKNQDCSKGIYALAARDVFLMLKKPNYKKLELQVYATFFEIYSGKVFDLLNRKTKLRVLEDGKQQVQVVGLQEREVKCVEDVLKLIDIGNSCRTSGQTSANAHSSRSHAVFQIILRRKGKLHGKFSLIDLAGNERGADTSSADRQTRLEGAEINKSLLALKECIRALGRNKPHTPFRASKLTQVLRDSFIGENSRTCMIATISPGMASCENTLNTLRYANRVKELTVDPTAAGDVRPIMHHPPNQIDDLETQWGVGSSPQRDDLKLLCEQNEEEVSPQLFTFHEAVSQMVEMEEQVVEDHRAVFQESIRWLEDEKALLEMTEEVDYDVDSYATQLEAILEQKIDILTELRDKVKSFRAALQEEEQASKQINPKRPRAL

SEQ ID NO: 89 - DNA, 3092 bp, Homo Sapiens
  CDS (141)...(3053)
tttcagcgtcgtcgcctggagcggcggtttagagaaccgagcctgatgggcgccaaggccggctggctgcttggagcgctgcctcgaagggcctgcgtgaaggaagctaatccggagaacccaggccagagcctggaaatatggcgacctgcatcggggagaagatcgaggattttaaagttggaaatctgcttggtaaaggatcatttgctggtgtctacagagctgagtccattcacactggtttggaagttgcaatcaaaatgatagataagaaagccatgtacaaagcaggaatggtacagagagtcaaaaatgaggtgaaaatacattgccaattgaaacatccttctatcttggagctttataactattttgaagatagcaattatgtgtatctggtattagaaatgtgccataatggagaaatgaacaggtatctaaagaatagagtgaaacccttctcagaaaatgaagctcgacacttcatgcaccagatcatcacagggatgttgtatcttcattctcatggtatactacaccgggacctcacactttctaacctcctactgactcgtaatatgaacatcaagattgctgattttgggctggcaactcaactgaaaatgccacatgaaaagcactatacattatgtggaactcctaactacatttcaccagaaattgccactcgaagtgcacatggccttgaatctgatgtttggtccctgggctgtatgttttatacattacttatcgggagaccacccttcgacactgacacagtcaagaacacattaaataaagtagtattggcagattatgaaatgccaacttttttgtcaatagaggccaaggaccttattcaccagttacttcgtagaaatccagcagatcgtttaagtctgtcttcagtattggaccatccttttatgtcccgaaattcttcaacaaaaagtaaagatttaggaactgtggaagactcaattgatagtgggcatgccacaatttctactgcaattacagcttcttccagtaccagtataagtggtagtttatttgacaaaagaagacttttgattggtcagccactcccaaataaaatgactgtatttccaaagaataaaagttcaactgatttttcttcttcaggagatggaaacagtttttatactcagtggggaaatcaagaaaccagtaatagtggaaggggaagagtaattcaagatgcagaagaaaggccacattctcgataccttcgtagagcttattcctctgatagatctggcacttctaatagtcagtctcaagcaaaaacatatacaatggaacgatgtcactcagcagaaatgctttcagtgtccaaaagatcaggaggaggtgaaaatgaagagaggtactcacccacagacaacaatgccaacatttttaacttctttaaagaaaagacatccagtagttctggatcttttgaaagacctgataacaatcaagcactctccaatcatctttgtccaggaaaaactccttttccatttgcagacccgacacctcagactgaaaccgtacaacagtggtttgggaatctgcaaataaatgctcatttaagaaaaactactgaatatgacagcatcagcccaaaccgggacttccagggccatccagatttgcagaaggacacatcaaaaaatgcctggactgatacaaaagtcaaaaagaactctgatgcttctgataatgcacattctgtaaaacagcaaaataccatgaaatatatgactgcacttcacagtaaacctgagataatccaacaagaatgtgtttttggctcagatcctctttctgaacagagcaagactaggggtatggagccaccatggggttatcagaatcgtacattaagaagcattacatctccgttggttgctcacaggttaaaaccaatcagacagaaaaccaaaaaggctgtggtgagcatacttgattcagaggaggtgtgtgtggagcttgtaaaggagtatgcatctcaagaatatgtgaaagaagttcttcagatatctagtgatggaaatacgatcactatttattatccaaatggtggtagaggttttcctcttgctgatagaccaccctcacctactgacaacatcagtaggtacagctttgacaatttaccagaaaaatactggcgaaaatatcaatatgcttccaggtttgtacagcttgtaagatctaaatctcccaaaatcacttattttacaagatatgctaaatgcattttgatggagaattctcctggtgctgattttgaggtttggttttatgatggggtaaaaatacacaaaacagaagatttcattcaggtgattgaaaagacagggaagtcttacactttaaaaagtgaaagtgaagttaatagcttgaaagaggagataaaaatgtttatggaccatgctaatgagggtcatcgtatttgtttagcactggaatccataatttcagaagaggaaaggaaaactaggagtgctccctttttcccaataatcataggaagaaaaccaggtagtactagttcacctaaggccttatcacctcctccttctgtggattcaaattacccaacgagagatagagcatctttcaacagaatggtcatgcatagtgctgcttctccaacacaggcaccaatccttaatccctctatggttacaaatgaaggacttggtcttacaactacagcttctggaacagacatctcttctaatagtctaaaagattgtcttcctaaatcagcacaacttttgaaatctgtttttgtgaaaaatgttggttgggctacacagttaactagtggagctgtgtgggttcagtttaatgatgggtcccagttggttgtgcaggcaggagtgtcttctatcagttatacctcaccaaatggtcaaacaactaggtatggagaaaatgaaaaattaccagactacatcaaacagaaattacagtgtctgtcttccatccttttgatgttttctaatccgactcctaattttcattgattaaaactcctttcagacatataagtttaataaataact

SEQ ID NO: 90 - protein, 970 aa, Homo Sapiens
MATCIGEKIEDFKVGNLLGKGSFAGVYRAESIHTGLEVAIKMIDKKAMYKAGMVQRVKNEVKIHCQLKHPSILELYNYFEDSNYVYLVLEMCHNGEMNRYLKNRVKPFSENEARHFMHQIITGMLYLHSHGILHRDLTLSNLLLTRNMNIKIADFGLATQLKMPHEKHYTLCGTPNYISPEIATRSAHGLESDVWSLGCMFYTLLIGRPPFDTDTVKNTLNKVVLADYEMPTFLSIEAKDLIHQLLRRNPADRLSLSSVLDHPFMSRNSSTKSKDLGTVEDSIDSGHATISTAITASSSTSISGSLFDKRRLLIGQPLPNKMTVFPKNKSSTDFSSSGDGNSFYTQWGNQETSNSGRGRVIQDAEERPHSRYLRRAYSSDRSGTSNSQSQAKTYTMERCHSAEMLSVSKRSGGGENEERYSPTDNNANIFNFFKEKTSSSSGSFERPDNNQALSNHLCPGKTPFPFADPTPQTETVQQWFGNLQINAHLRKTTEYDSISPNRDFQGHPDLQKDTSKNAWTDTKVKKNSDASDNAHSVKQQNTMKYMTALHSKPEIIQQECVFGSDPLSEQSKTRGMEPPWGYQNRTLRSITSPLVAHRLKPIRQKTKKAVVSILDSEEVCVELVKEYASQEYVKEVLQISSDGNTITIYYPNGGRGFPLADRPPSPTDNISRYSFDNLPEKYWRKYQYASRFVQLVRSKSPKITYFTRYAKCILMENSPGADFEVWFYDGVKIHKTEDFIQVIEKTGKSYTLKSESEVNSLKEEIKMFMDHANEGHRICLALESIISEEERKTRSAPFFPIIIGRKPGSTSSPKALSPPPSVDSNYPTRDRASFNRMVMHSAASPTQAPILNPSMVTNEGLGLTTTASGTDISSNSLKDCLPKSAQLLKSVFVKNVGWATQLTSGAVWVQFNDGSQLVVQAGVSSISYTSPNGQTTRYGENEKLPDYIKQKLQCLSSILLMFSNPTPNFH

SEQ ID NO: 91 - DNA, 3164 bp, Homo Sapiens
  CDS (3)...(2756)
gcagccccggcggccgaacgcccgcggcgcgggactccatcgtcagagaagtcattcagaattcaaaagaagttctaagtttattgcaagaaaaaaaccctgccttcaagccggttcttgcaattatccaggcaggtgacgacaacttgatgcaggaaatcaaccagaatttggctgaggaggctggtctgaacatcactcacatttgcctccctccagatagcagtgaagccgagattatagatgaaatcttaaagatcaatgaagataccagagtacatggccttgcccttcagatctctgagaacttgtttagcaacaaagtcctcaatgccttgaaaccagaaaaagatgtggatggagtaacagacataaacctggggaagctggtgcgaggggatgcccatgaatgttttgtttcacctgttgccaaagctgtaattgaacttcttgaaaaatcaggtgtcaacctagatggaaagaagattttggtagtgggggcccatgggtctttggaagctgctctacaatgcctgttccagagaaaagggtccatgacaatgagcatccagtggaaaacacgccagcttcaaagcaagcttcacgaggctgacattgtggtcctaggctcacctaagccagaagagattccccttacttggatacaaccaggaactactgttctcaactgctcccatgacttcctgtcagggaaggttgggtgtggctctccaagaatacattttggtggactcattgaggaagatgatgtgattctccttgctgcagctctgcgaattcagaacatggtcagtagtggaaggagatggcttcgtgaacagcagcacaggcggtggagacttcactgcttgaaacttcagcctctctcccctgtgccaagtgacattgagatttcaagaggacaaactccaaaagctgtggatgtccttgccaaggagattggattgcttgcagatgaaattgaaatctatggcaaaagcaaagccaaagtacgtttgtccgtgctagaaaggttaaaggatcaagcagatggaaaatacgtcttagttgctgggatcacacccacccctcttggagaagggaagagcacagtcaccatcgggcttgtgcaggctctgaccgcacacctgaatgtcaactcctttgcctgcttgaggcagccttcccaaggaccgacgtttggagtgaaaggaggagccgcgggtggtggatatgcccaggtcatccccatggaggagttcaaccttcacttgactggagacatccacgccatcaccgctgccaataacttgctggctgccgccatcgacacgaggattcttcatgaaaacacgcaaacagataaggctctgtataatcggctggttcctttagtgaatggtgtcagagaattttcagaaattcagcttgctcggctaaaaaaactgggaataaataagactgatccgagcacactgacagaagaggaagtgagtaaatttgcccgtctcgacatcgacccatctaccatcacgtggcagagagtattggatacaaatgaccgatttctacgaaaaataaccatcgggcagggaaacacagagaagggccattaccggcaggcgcagtttgacatcgcagtggccagcgagatcatggcggtgctggccctgacggacagcctcgcagacatgaaggcacggctgggaaggatggtggtggccagtgacaaaagcgggcagcctgtgacagcagatgatttgggggtgacaggtgctttgacagttttgatgaaagatgcaataaaaccaaacctgatgcagaccctggaagggacacctgtgttcgtgcatgcgggcccttttgctaacattgctcacggcaactcttcagtgttggctgataaaattgccctgaaactggttggtgaagaaggatttgtagtgaccgaagctggctttggtgctgacatcggaatggagaaattcttcaacatcaagtgccgagcttccggcttggtgcccaacgtggttgtgttagtggcaacggtgcgagctctgaagatgcatggaggcgggccaagtgtaacggctggtgttcctcttaagaaagaatatacagaggagaacatccagctggtggcagacggctgctgtaacctccagaagcaaattcagatcactcagctctttggggttcccgttgtggtggctctgaatgtcttcaagaccgacacccgcgctgagattgacttggtgtgtgagcttgcaaagcgggctggtgcctttgatgcagtcccctgctatcactggtccgttggtggaaaaggatcggtggacttggctcgggctgtgagagaggctgcgagtaaaagaagccgattccagttcctgtatgatgttcaggttccaattgtggacaagataaggaccattgctcaggctgtctatggagccaaagatattgaactctctcctgaggcacaagccaaaatagatcgttacactcaacagggttttggaaatttgcccatctgcatggcaaagacccacctttctctatctcaccaacctgacaaaaaaggtgtgccaagggacttcatcttacctatcagtgacgtccgggccagcataggcgctgggttcatttaccctttggtcggaacgatgagcaccatgccaggactgcccacccggccctgcttttatgacatagatcttgataccgaaacagaacaagttaaaggcttgttctaagtggacaaggctctcacaggacccgatgcagactcctgaaacagactactctttgcctttttgctgcagttggagaagaaactgaatttgaaaaatgtctgttatgcaatgctggagacgtggtgaaataggccaaagatttcttcttcgttcaagatgaattctgttcacagtggagtatggtgttcggcaaaaggacctccaccaagactgaaagaaactaatttatttctgtttctgtggagtttccattatttctactgcttacactttagaatgtttattttatggggactaagggattaggagtgtgaactaaaaggtaacattttccactctcaagttttctactttgtctttgaactgaaaataaacatggatctagaaaaccaaaaaaaaaaaaaaaaa

SEQ ID NO: 92 - protein, 917 aa, Homo Sapiens
SPGGRTPAARDSIVREVIQNSKEVLSLLQEKNPAFKPVLAIIQAGDDNLMQEINQNLAEEAGLNITHICLPPDSSEAEIIDEILKINEDTRVHGLALQISENLFSNKVLNALKPEKDVDGVTDINLGKLVRGDAHECFVSPVAKAVIELLEKSGVNLDGKKILVVGAHGSLEAALQCLFQRKGSMTMSIQWKTRQLQSKLHEADIVVLGSPKPEEIPLTWIQPGTTVLNCSHDFLSGKVGCGSPRIHFGGLIEEDDVILLAAALRIQNMVSSGRRWLREQQHRRWRLHCLKLQPLSPVPSDIEISRGQTPKAVDVLAKEIGLLADEIEIYGKSKAKVRLSVLERLKDQADGKYVLVAGITPTPLGEGKSTVTIGLVQALTAHLNVNSFACLRQPSQGPTFGVKGGAAGGGYAQVIPMEEFNLHLTGDIHAITAANNLLAAAIDTRILHENTQTDKALYNRLVPLVNGVREFSEIQLARLKKLGINKTDPSTLTEEEVSKFARLDIDPSTITWQRVLDTNDRFLRKITIGQGNTEKGHYRQAQFDIAVASEIMAVLALTDSLADMKARLGRMVVASDKSGQPVTADDLGVTGALTVLMKDAIKPNLMQTLEGTPVFVHAGPFANIAHGNSSVLADKIALKLVGEEGFVVTEAGFGADIGMEKFFNIKCRASGLVPNVVVLVATVRALKMHGGGPSVTAGVPLKKEYTEENIQLVADGCCNLQKQIQITQLFGVPVVVALNVFKTDTRAEIDLVCELAKRAGAFDAVPCYHWSVGGKGSVDLARAVREAASKRSRFQFLYDVQVPIVDKIRTIAQAVYGAKDIELSPEAQAKIDRYTQQGFGNLPICMAKTHLSLSHQPDKKGVPRDFILPISDVRASIGAGFIYPLVGTMSTMPGLPTRPCFYDIDLDTETEQVKGLF

SEQ ID NO: 93 - DNA, 2970 bp, Homo Sapiens
  CDS (14)...(1690)
tccgcttgtggccatgtaccgctacctgggcgaagcgctgttgctgtcccgggccgggcccgctgccctgggctcggcgtccgccgactcggccgcgttgctgggctgggcccggggacagcccgccgccgccccgcagccggggctggcattggccgcccggcgccactacagcgaggcggtggccgaccgcgaggacgaccccaacttcttcaagatggtggagggcttcttcgatcgcggcgccagcatcgtggaggacaagctggtggaggacctgaggacccgggagagcgaggagcagaagcggaaccgggtgcgcggcatcctgcggatcatcaagccctgcaaccatgtgctgagtctctccttccccatccggcgcgacgacggctcctgggaggtcatcgaaggctaccgggcccagcacagccagcaccgcacgccctgcaagggaggtatccgttacagcactgatgtgagtgtagatgaagtaaaagctttggcttctctgatgacatacaagtgtgcagtggttgatgtgccgtttgggggtgctaaagctggtgttaagatcaatcccaagaactatactgataatgaattggaaaagatcacaaggaggttcaccatggagctagcaaaaaagggctttattggtcctggcattgatgtgcctgctccagacatgagcacaggtgagcgggagatgtcctggatcgctgatacctatgccagcaccatagggcactatgatattaatgcacacgcctgtgttactggtaaacccatcagccaagggggaatccatggacgcatctctgctactggccgtggtgtcttccatgggattgaaaatttcatcaatgaagcttcttacatgagcattttaggaatgacaccagggtttggagataaaacatttgttgttcagggatttggtaatgtgggcctacactctatgagatatttacatcgttttggtgctaaatgtattgctgttggtgagtctgatgggagtatatggaatccagatggtattgacccaaaggaactggaagacttcaaattgcaacatgggtccattctgggcttccccaaggcaaagccctatgaaggaagcatcttggaggccgactgtgacatactgatcccagctgccagtgagaagcagttgaccaaatccaacgcacccagagtcaaagccaagatcattgctgaaggtgccaatgggccaacaactccagaagctgacaagatcttcctggagagaaacattatggttattccagatctctacttgaatgctggaggagtgacagtatcttactttgagtggctgaagaatctaaatcatgtcagctatggccgtttgaccttcaaatatgaaagggattctaactaccacttgctcatgtctgttcaagagagtttagaaagaaaatttggaaagcatggtggaactattcccattgtacccacggcagagttccaagacaggatatcgggtgcatctgagaaagacatcgtgcactctggcttggcatacacaatggagcgttctgccaggcaaattatgcgcacagccatgaagtataacctgggattggacctgagaacagctgcctatgttaatgccattgagaaagtcttcaaagtgtacaatgaagctggtgtgaccttcacatagatggatcatggctgacttcctcactatcctcttcacatgtaacttctgcagacctatcacaagtttacatgtaaccacagaaatccctttctctcctgactcattaataatggataccattctcaacaagtcaatccaagtcagcccgttaaggagaaagaaattaaggttagcggatcatgtacaagctgagtgtgaaagtagaaatcacctacaccagagagccattttggtattttgcctttaaataaaaagcctcctttatctggctgtgcagccttgctctgtggcttttcccaacacaatcagtgctagtgctggggaggaacagtcaagagcagtcagttgcttgcttattttttctggatgagtctgggacacactgtaactttaacacatttaagaagtaggtgtgtggccttttcagaaggtggcatggtcctcaagtgagttcttagtattttatatcagcaaaataattcaattttgcaggttgcaaacaaatataaaacctgtttctgtttatgaatattattcttttagaatagaataagtacatgctgctgtaataaaattgcctttaatcacttaacaagcctaaccttgactcaaacagtgaatgcctatagaaataataaatgaaaaaaactagtatttttatatcataaaacaatgtcatttatagcttatcattcatgtattgtccagcagacattaaaagccctgtggataattaagttatcttcatacctgcaaaatggtggaggctattttcattaaaactgtcagaatttgcttactataattatgatacagtccaaagaatgcagtcactttttatcatgttaactaattgttctcttttgaagatctatggttgactaattaaacaataattcaagtagagtgtcccagaaaaaaaccacttgggctccctgtttggagtctggctggctctgagcattgccaatggcccctactcacctgactttgtatcctctccttttagaggctttgcattctgcacccagcttcactaacagtgggctgaaaacatccttgggttgagtgtttcatttgggagttatttggccagggccttttgaacagtagtgtccccatgaagtgctagataatatatgtgtaagagtcagcttttttttttttttaactctaacacccttcagaaatttctaactactttgtaactgcatggcttaacctggtgataaaagcagttattaaaagtctacgttttccaaaaaaaaaaaaaaaaaaaa

SEQ ID NO: 94 - protein, 558 aa, Homo Sapiens
MYRYLGEALLLSRAGPAALGSASADSAALLGWARGQPAAAPQPGLALAARRHYSEAVADREDDPNFFKMVEGFFDRGASIVEDKLVEDLRTRESEEQKRNRVRGILRIIKPCNHVLSLSFPIRRDDGSWEVIEGYRAQHSQHRTPCKGGIRYSTDVSVDEVKALASLMTYKCAVVDVPFGGAKAGVKINPKNYTDNELEKITRRFTMELAKKGFIGPGIDVPAPDMSTGEREMSWIADTYASTIGHYDINAHACVTGKPISQGGIHGRISATGRGVFHGIENFINEASYMSILGMTPGFGDKTFVVQGFGNVGLHSMRYLHRFGAKCIAVGESDGSIWNPDGIDPKELEDFKLQHGSILGFPKAKPYEGSILEADCDILIPAASEKQLTKSNAPRVKAKIIAEGANGPTTPEADKIFLERNIMVIPDLYLNAGGVTVSYFEWLKNLNHVSYGRLTFKYERDSNYHLLMSVQESLERKFGKHGGTIPIVPTAEFQDRISGASEKDIVHSGLAYTMERSARQIMRTAMKYNLGLDLRTAAYVNAIEKVFKVYNEAGVTFT

SEQ ID NO: 95 - DNA, 2096 bp, Homo Sapiens
  CDS (177)...(1478)
ggcacgagctgcactgcgcttgcgcgggttgagggcggtggctcagtctcctggaaaggaccgtccacccctccgcgctggcggtgtggacgcggaactcagcggagaaacgcgattgagaaatggaaaagaaaatgaaataaatcagcagttatgaggcagagcctaagagaactatggcaacatcaggtgactgtcccagaagtgaatcgcagggagaagagcctgctgagtgcagtgaggcgggtctcctgcaggagggagtacagccagaggagtttgtggccatcgcggactacgctgccaccgatgagacccagctcagttttttgagaggagaaaaaattcttatcctgagacaaaccactgcagattggtggtggggtgagcgtgcgggctgctgtgggtacattccggcaaaccatgtggggaagcacgtggatgagtacgaccccgaggacacgtggcaggatgaagagtacttcggcagctatggaactctgaaactccacttggagatgttggcagaccagccacgaacaactaaataccacagtgtcatcctgcagaataaagaatccctgacggataaagtcatcctggacgtgggctgtgggactgggatcatcagtctcttctgtgcacactatgcgcggcctagagcggtgtacgcggtggaggccagtgagatggcacagcacacggggcagctggtcctgcagaacggctttgctgacatcatcaccgtgtaccagcagaaggtggaggatgtggtgctgcccgagaaggtggacgtgctggtgtctgagtggatggggacctgcctgctgtttgagttcatgatcgagtccatcctgtatgcccgggatgcctggctgaaagaggacggggtcatttggcccaccatggctgcgttgcaccttgtgccctgcagtgctgataaggattatcgtagcaaggtgctcttctgggacaacgcgtacgagttcaacctcagcgctctgaaatctttagcagttaaggagtttttttcaaagcccaagtataaccacattttgaaaccagaagactgtctctctgaaccgtgcactatattgcagttggacatgagaaccgtgcaaatttctgatctagagaccctgaggggcgagctgcgcttcgacatcaggaaggcggggaccctgcacggcttcacggcctggtttagcgtccacttccagagcctgcaggaggggcagccgccgcaggtgctcagcaccgggcccttccaccccaccacacactggaagcagacgctgttcatgatggacgacccagtccctgtccatacaggagacgtggtcacgggttcagttgtgttgcagagaaacccagtgtggagaaggcacatgtctgtggctctgagctgggctgtcacttccagacaagaccccacatctcaaaaagttggagaaaaagtcttccccatctggagatgacagttgatgctttatttggaaagcagtgtgcatatcttgaggggtgatgaacacaagcaaaccaagttgcacctggcttctgcacactcctgcgaaagtcggtgaacattcactccacattgacccctccctagcctggcaggtgacgtcagggtccttcacagacaaacacgcttgggctcggcaggagctgccgtggccacccccgctgcccagtgtctgccctctagaagtaggctgtgtttccaggtgttcacccgtggtgcccacagtgccgacccgtggctgggtcggagctccatgttcctaagctaggtctaggtctacactcctaggacgcacgcatatcagcccgtgtaccctgtgacagtgactgtccccacctcctgtgttagtggtgcccttactgccgtcgctcatccactcgtgtgggacgtaggattgcacagggctgtgccagtggcgtgtagggaacactgccctggctcagcgtgcgagctaaggtggcgatgtatgcgatgggactctgcatgggatagtacagttgtgtagacgtcttccaaataaattatgtgttggtgcatcgcacatgctcaataaatatttttaaatgagtga

SEQ ID NO: 96 - protein, 433 aa, Homo Sapiens
MATSGDCPRSESQGEEPAECSEAGLLQEGVQPEEFVAIADYAATDETQLSFLRGEKILILRQTTADWWWGERAGCCGYIPANHVGKHVDEYDPEDTWQDEEYFGSYGTLKLHLEMLADQPRTTKYHSVILQNKESLTDKVILDVGCGTGIISLFCAHYARPRAVYAVEASEMAQHTGQLVLQNGFADIITVYQQKVEDVVLPEKVDVLVSEWMGTCLLFEFMIESILYARDAWLKEDGVIWPTMAALHLVPCSADKDYRSKVLFWDNAYEFNLSALKSLAVKEFFSKPKYNHILKPEDCLSEPCTILQLDMRTVQISDLETLRGELRFDIRKAGTLHGFTAWFSVHFQSLQEGQPPQVLSTGPFHPTTHWKQTLFMMDDPVPVHTGDVVTGSVVLQRNPVWRRHMSVALSWAVTSRQDPTSQKVGEKVFPIWR

SEQ ID NO: 97 - DNA, 1331 bp, Homo Sapiens
  CDS (10)...(960)
aattcgggcatggcaagccgtctcctgctcaacaacggcgccaagatgcccatcctggggttgggtacctggaagtcccctccagggcaggtgactgaggccgtgaaggtggccattgacgtcgggtaccgccacatcgactgtgcccatgtgtaccagaatgagaatgaggtgggggtggccattcaggagaagctcagggagcaggtggtgaagcgtgaggagctcttcatcgtcagcaagctgtggtgcacgtaccatgagaagggcctggtgaaaggagcctgccagaagacactcagcgacctgaagctggactacctggacctctaccttattcactggccgactggctttaagcctgggaaggaatttttcccattggatgagtcgggcaatgtggttcccagtgacaccaacattctggacacgtgggcggccatggaagagctggtggatgaagggctggtgaaagctattggcatctccaacttcaaccatctccaggtggagatgatcttaaacaaacctggcttgaagtataagcctgcagttaaccagattgagtgccacccatatctcactcaggagaagttaatccagtactgccagtccaaaggcatcgtggtgaccgcctacagccccctcggctctcctgacaggccctgggccaagcccgaggacccttctctcctggaggatcccaggatcaaggcgatcgcagccaagcacaataaaactacagcccaggtcctgatccggttccccatgcagaggaacttggtggtgatccccaagtctgtgacaccagaacgcattgctgagaactttaaggtctttgactttgaactgagcagccaggatatgaccaccttactcagctacaacaggaactggagggtctgtgccttgttgagctgtacctcccacaaggattaccccttccatgaagagttttgaagctgtggttgcctgctcgtccccaagtgacctatacctgtgtttcttgcctcatttttttccttgcaaatgtagtatggcctgtgtcactcagcagtgggacagcaacctgtagagtggccagcgagggcgtgtctagcttgatgttggatctcaagagccctgtcagtagagtagaagtctcttccagtttgctttgcccttctttctaccctgctggggaaagtacaacctgaatacccttttctgaccaaagagaagcaaaatctaccaggtcaaaatagtgccactaacggttgagttttgactgcttggaactggaatcctttcagcaagacttctctttgcctcaaataaaaagtgcttttgtg

SEQ ID NO: 98 - protein, 316 aa, Homo Sapiens
MASRLLLNNGAKMPILGLGTWKSPPGQVTEAVKVAIDVGYRHIDCAHVYQNENEVGVAIQEKLREQVVKREELFIVSKLWCTYHEKGLVKGACQKTLSDLKLDYLDLYLIHWPTGFKPGKEFFPLDESGNVVPSDTNILDTWAAMEELVDEGLVKAIGISNFNHLQVEMILNKPGLKYKPAVNQIECHPYLTQEKLIQYCQSKGIVVTAYSPLGSPDRPWAKPEDPSLLEDPRIKAIAAKHNKTTAQVLIRFPMQRNLVVIPKSVTPERIAENFKVFDFELSSQDMTTLLSYNRNWRVCALLSCTSHKDYPFHEEF

SEQ ID NO: 99 - DNA, 772 bp, Homo Sapiens
  CDS (30)...(623)
ggaagcggcggtgcaggtttcttgccttgatgtactggagcaatcagatcacacggcggcttggagagcgagtgcaaggttttatgagtggaattagccctcagcagatgggggagccagaaggcagttggagtgggaagaacccagggaccatgggcgcctccaggctctataccctggtgctggtcctgcagcctcagcgagttctcctgggcatgaaaaagcgaggcttcggggccggccggtggaatggctttgggggcaaagtgcaagaaggagagaccatcgaggatggggctaggagggagctgcaggaggagagcggtctgacagtggacgccctgcacaaggtgggccagatcgtgtttgagttcgtgggcgagcctgagctcatggacatgcatgtcttctgcacagacagcatccaggggacccccgtggagagcgacgaaatgcgcccatgctggttccagctggatcagatccccttcaaggacatgtggcccgacgacagctactggtttccactcctgcttcagaagaagaaattccacgggtacttcaagttccagggtcaggacaccatcctggactacacactccgcgaggtggacacggtctagcgggagcccagggcagcccctgggcaggagacgtggctgctgaacagctgcaaaccatcttcacctgggggcattgagtggcgcagagccgggtttcatctggaattaactggatggaagggaaaataaagctatctagcggtgaaaaa

SEQ ID NO: 100 - protein, 197 aa, Homo Sapiens [sequence omitted]

SEQ ID NO: 101 - DNA, 972 bp, Homo Sapiens
  CDS (1)...(972)
atggatcccaaatatcagcgtgtagagctaaatgatggtcacttcatgcccgtattgggatttggcacctatgcacctccagaggttccgaggaacagagctgtagaggtcaccaaattagcaatagaagctggcttccgccatattgattctgcttatttatacaataatgaggagcaggttggactggccatccgaagcaagattgcagatggcagtgtgaagagagaagacatattctacacttcaaagctttggtgcactttctttcaaccacagatggtccaaccagccttggaaagctcactgaaaaaacttcaactggactatgttgacctctatcttcttcatttcccaatggctctcaagccaggtgagacgccactaccaaaagatgaaaatggaaaagtaatattcgacacagtggatctctctgccacatgggaggtcatggagaagtgtaaggatgcaggattggccaagtccatcggggtgtcaaacttcaactgcaggcagctggagatgatcctcaacaagccaggactcaagtacaagcctgtctgcaaccaggtagaatgtcatccttacctcaaccagagcaaactgctggatttctgcaagtcaaaagacattgttctggttgcccacagtgctctgggaacccaacgacataaactatgggtggacccaaactccccagttcttttggaggacccagttctttgtgccttagcaaagaaacacaaacgaaccccagccctgattgccctgcgctaccagctgcagcgtggggttgtggtcctggccaagagctacaatgagcagcggatcagagagaacatccaggtttttgaattccagttgacatcagaggatatgaaagttctagatggtctaaacagaaattatcgatatgttgtcatggattttcttatggaccatcctgattatccattttcagatgaatattag

SEQ ID NO: 102 - protein, 323 aa, Homo Sapiens
MDPKYQRVELNDGHFMPVLGFGTYAPPEVPRNRAVEVTKLAIEAGFRHIDSAYLYNNEEQVGLAIRSKIADGSVKREDIFYTSKLWCTFFQPQMVQPALESSLKKLQLDYVDLYLLHFPMALKPGETPLPKDENGKVIFDTVDLSATWEVMEKCKDAGLAKSIGVSNFNCRQLEMILNKPGLKYKPVCNQVECHPYLNQSKLLDFCKSKDIVLVAHSALGTQRHKLWVDPNSPVLLEDPVLCALAKKHKRTPALIALRYQLQRGVVVLAKSYNEQRIRENIQVFEFQLTSEDMKVLDGLNRNYRYVVMDFLMDHPDYPFSDEY

SEQ ID NO: 103 - DNA, 2770 bp, Homo Sapiens
  CDS (2)...(2563)
atttcaagtgtcatattttgcatttaaatttgccaaaaaggattgtccagtctccaacatcaataattcttctattccttcagctcttcctgaaccgatgactgctagtgaagcagctgctaggaaaagccaaataaaagccagaataacagataccattggaccaacagaaacctcaattgcaccaagacaaagaccaaaggccaactctgctactactgccactcccagtgtgctgaccattcaaagttcagcaacacctgttaaagtccttgctcctggtgaattcggtaaccatagaccaaaaggggcactaagacctggaaatggccctgaaattttattgggtcagggacctcctcagcagccgccacagcagcatagagtactccagcaactacagcagggagattggagattacagcaactccatttacagcatcgtcatcctcaccagcagcagcagcagcagcagcagcaacagcaacagcagcagcagcaacagcaacagcagcagcagcagcagcagcagcagcaccaccaccaccaccaccaccacctacttcaagatgcttatatgcagcagtatcaacatgcaacacagcagcaacagatgcttcaacaacaatttttaatgcattcggtatatcaaccacaaccttctgcatcacagtatcctacaatgatgccgcagtatcagcaggctttctttcaacagcagatgctagctcaacatcagccgtctcaacaacaggcatcacctgaatatcttacctcccctcaagagttctcaccagccttagtttcctacacttcatcacttccagctcaggttggaaccataatggactcctcctatagtgccaataggtcagttgctgataaagaggccattgcaaatttcacaaatcagaagaacatcagcaatccacctgatatgtcagggtggaatccttttggagaggataatttctctaagttaacagaagaggaactattggacagagaatttgaccttctaagatcaaataggctcgaggagagagcatcctcagataagaatgtagactcactttctgctccacataaccatcctccagaagatccttttggttctgttcctttcatttctcattcaggttctcctgaaaagaaagctgaacattcatctataaatcaagaaaatggcactgcaaaccctatcaagaacggtaaaacaagtccagcatctaaagatcagcggactggaaagaaaacctcagtacagggtcaagtgcaaaaggggaatgatgaatctgaaagtgattttgaatcagatcccccttctcctaagagcagtgaagaggaagagcaagatgatgaagaagttcttcagggggaacaaggagattttaatgatgatgatactgaaccagaaaatctgggtcataggcctctcctcatggattctgaagatgaggaagaagaggagaaacatagctctgattctgattatgagcaggctaaagcaaagtacagtgacatgagctctgtctacagagacagatctggcagtggaccaacccaagatcttaatacaatactcctcacctcagcccaattatcctctgatgttgcagtggagactcccaaacaggagtttgatgtatttggcgctgtccccttctttgcagtgcgtgctcaacagccccagcaagaaaagaatgaaaagaacctccctcaacacaggtttcctgctgcaggactggagcaggaggaatttgatgtattcacaaaggcgccttttagcaagaaggtgaatgtacaagaatgccatgcagtggggcctgaggcacatactatccctggttatcccaaaagtgtagatgtatttggctccactccatttcagcccttcctcacatcaacaagtaaaagtgaaagcaatgaggacctttttgggcttgtgccctttgatgaaataacggggagccagcagcaaaaagtcaaacagcgcagcttacagaaactgtcctctcgccaaaggcgcacaaagcaggatatgtccaaaagtaatgggaagcggcatcatggcacgccaactagcacaaagaagactttgaagcctacctatcgcactccagagagggctcgcaggcacaaaaaagtgggccgccgagactctcaaagtagcaatgaatttttaaccatctcagactccaaggagaacattagtgttgcactgactgatgggaaagatagggggaatgtcttacaacctgaggagagcctgttggaccccttcggtgccaagcccttccattctccagacctgtcatggcaccctccacatcagggcctgagcgacatccgtgctgatcacaatactgtcctgccagggcggccaagacaaaattcactacatgggtcattccatagtgcagatgtattgaaaatggatgattttggtgccgtgccctttacagaacttgtggtgcaaagcatcactccacatcagtcccaacagtcccaaccagtcgaattagacccatttggtgctgctccatttccttctaaacagtagatacttctgatggattctcggcattaactcctgtttcaaaaaagtgtgaacagttttatgaatttgaaagaaaatttggtagctctttatagcattcattcttaaagatcagtcagaataggtgatttctaaataaaccaaatagaagaatgaaaaaaaaaaaaaaaaaaaaaaaaaaaaaaaaaaaaaaaaaaaaaaaaaaaaaaa

SEQ ID NO: 104 - protein, 853 aa, Homo Sapiens
FQVSYFAFKFAKKDCPVSNINNSSIPSALPEPMTASEAAARKSQIKARITDTIGPTETSIAPRQRPKANSATTATPSVLTIQSSATPVKVLAPGEFGNHRPKGALRPGNGPEILLGQGPPQQPPQQHRVLQQLQQGDWRLQQLHLQHRHPHQQQQQQQQQQQQQQQQQQQQQQQQQQQHHHHHHHHLLQDAYMQQYQHATQQQQMLQQQFLMHSVYQPQPSASQYPTMMPQYQQAFFQQQMLAQHQPSQQQASPEYLTSPQEFSPALVSYTSSLPAQVGTIMDSSYSANRSVADKEAIANFTNQKNISNPPDMSGWNPFGEDNFSKLTEEELLDREFDLLRSNRLEERASSDKNVDSLSAPHNHPPEDPFGSVPFISHSGSPEKKAEHSSINQENGTANPIKNGKTSPASKDQRTGKKTSVQGQVQKGNDESESDFESDPPSPKSSEEEEQDDEEVLQGEQGDFNDDDTEPENLGHRPLLMDSEDEEEEEKHSSDSDYEQAKAKYSDMSSVYRDRSGSGPTQDLNTILLTSAQLSSDVAVETPKQEFDVFGAVPFFAVRAQQPQQEKNEKNLPQHRFPAAGLEQEEFDVFTKAPFSKKVNVQECHAVGPEAHTIPGYPKSVDVFGSTPFQPFLTSTSKSESNEDLFGLVPFDEITGSQQQKVKQRSLQKLSSRQRRTKQDMSKSNGKRHHGTPTSTKKTLKPTYRTPERARRHKKVGRRDSQSSNEFLTISDSKENISVALTDGKDRGNVLQPEESLLDPFGAKPFHSPDLSWHPPHQGLSDIRADHNTVLPGRPRQNSLHGSFHSADVLKMDDFGAVPFTELVVQSITPHQSQQSQPVELDPFGAAPFPSKQ

SEQ ID NO: 105 - DNA, 2980 bp, Homo Sapiens
  CDS (222)...(2672)
gtccaacttggccggaagctgcggagaggctcagccaccggaagtcagtggagggttcggccggacgctctagaatcccggaggaccgggatctctgtggttggccgtgacgggcaccctctaccggggatgacacattcccagagctcctgggaccaagcaaatggcggacacaattccctgggcggaaggggacttcgggagccagtagccaagacaccatggccgagcctctgaaggaggaagacggcgaggacggctctgcggagccccccgggcccgtgaaggtcgaacccgcccacaccgctgcctctgtagcggccaagaacctggccctgcttaaagcccgctccttcgatgtgacctttgacgtgggcgacgagtacgagatcatcgagaccataggcaacggggcctatggagtggtgtcctccgcccgccgccgcctcaccggccagcaggtggccatcaagaagatccctaatgctttcgatgtggtgaccaatgccaagcggaccctcagggagctgaagatcctcaagcactttaaacacgacaacatcatcgccatcaaggacatcctgaggcccaccgtgccctatggcgaattcaaatctgtctacgtggtcctggacctgatggaaagcgacctgcaccagatcatccactcctcacagcccctcacactggaacacgtgcgctacttcctgtaccaactgctgcggggcctgaagtacatgcactcggctcaggtcatccaccgtgacctgaagccctccaacctattggtgaatgagaactgtgagctcaagattggtgactttggtatggctcgtggcctgtgcacctcgcccgctgaacatcagtacttcatgactgagtatgtggccacgcgctggtaccgtgcgcccgagctcatgctctctttgcatgagtatacacaggctattgacctctggtctgtgggctgcatctttggtgagatgctggcccggcgccagctcttcccaggcaaaaactatgtacaccagctacagctcatcatgatggtgctgggtaccccatcaccagccgtgattcaggctgtgggggctgagagggtgcgggcctatatccagagcttgccaccacgccagcctgtgccctgggagacagtgtacccaggtgccgaccgccaggccctatcactgctgggtcgcatgctgcgttttgagcccagcgctcgcatctcagcagctgctgcccttcgccaccctttcctggccaagtaccatgatcctgatgatgagcctgactgtgccccgccctttgactttgcctttgaccgcgaagccctcactcgggagcgcattaaggaggccattgtggctgaaattgaggacttccatgcaaggcgtgagggcatccgccaacagatccgcttccagccttctctacagcctgtggctagtgagcctggctgtccagatgttgaaatgcccagtccctgggctcccagtggggactgtgccatggagtctccaccaccagccccgccaccatgccccggccctgcacctgacaccattgatctgaccctgcagccacctccaccagtcagtgagcctgccccaccaaagaaagatggtgccatctcagacaatactaaggctgcccttaaagctgccctgctcaagtctttgaggagccggctcagagatggccccagcgcacccctggaggctcctgagcctcggaagccggtgacagcccaggagcgccagcgggagcgggaggagaagcggcggaggcggcaagaacgagccaaggagcgggagaaacggcggcaggagcgggagcgaaaggaacggggggctggggcctctgggggcccctccactgaccccttggctggactagtgctcagtgacaatgacagaagcctgttggaacgctggactcgaatggcccggcccgcagccccagccctcacctctgtgccggcccctgccccagcgccaacgccaaccccaaccccagtccaacctaccagtcctcctcctggccctgtagcccagcccactggcccgcaaccacaatctgcgggctctacctctggccctgtaccccagcctgcctgcccaccccctggccctgcaccccaccccactggccctcctgggcccatccctgtccccgcgccaccccagattgccacctccaccagcctcctggctgcccagtcacttgtgccaccccctgggctgcctggctccagcaccccaggagttttgccttacttcccacctggcctgccgcccccagacgccgggggagcccctcagtcttccatgtcagagtcacctgatgtcaaccttgtgacccagcagctatctaagtcacaggtggaggaccccctgccccctgtgttctcaggcacaccaaagggcagtggggctggctacggtgttggctttgacctggaggaattcttaaaccagtctttcgacatgggcgtggctgatgggccacaggatggccaggcagattcagcctctctctcagcctccctgcttgctgactggctcgaaggccatggcatgaaccctgccgatattgagtccctgcagcgtgagatccagatggactccccaatgctgctggctgacctgcctgacctccaggacccctgaggcccccagcctgtgccttgctgccacagtagacctagttccaggatccatgggagcattctcaaaggctttagccctggacccagcaggtgaggctcggcttggattattctgcaggttcatctcagacccacctttcagccttaagcagccacctgagccaccaccgagccatggcaggatcgggagaccccaactccccctgaacaatccttttcagtattatatttttattattattatgttattattacactgtctttttgccatcaaaatgaggcctgtgaaatacaaggttcccttctgca

SEQ ID NO: 106 - protein, 816 aa, Homo Sapiens
MAEPLKEEDGEDGSAEPPGPVKVEPAHTAASVAAKNLALLKARSFDVTFDVGDEYEIIETIGNGAYGVVSSARRRLTGQQVAIKKIPNAFDVVTNAKRTLRELKILKHFKHDNIIAIKDILRPTVPYGEFKSVYVVLDLMESDLHQIIHSSQPLTLEHVRYFLYQLLRGLKYMHSAQVIHRDLKPSNLLVNENCELKIGDFGMARGLCTSPAEHQYFMTEYVATRWYRAPELMLSLHEYTQAIDLWSVGCIFGEMLARRQLFPGKNYVHQLQLIMMVLGTPSPAVIQAVGAERVRAYIQSLPPRQPVPWETVYPGADRQALSLLGRMLRFEPSARISAAAALRHPFLAKYHDPDDEPDCAPPFDFAFDREALTRERIKEAIVAEIEDFHARREGIRQQIRFQPSLQPVASEPGCPDVEMPSPWAPSGDCAMESPPPAPPPCPGPAPDTIDLTLQPPPPVSEPAPPKKDGAISDNTKAALKAALLKSLRSRLRDGPSAPLEAPEPRKPVTAQERQREREEKRRRRQERAKEREKRRQERERKERGAGASGGPSTDPLAGLVLSDNDRSLLERWTRMARPAAPALTSVPAPAPAPTPTPTPVQPTSPPPGPVAQPTGPQPQSAGSTSGPVPQPACPPPGPAPHPTGPPGPIPVPAPPQIATSTSLLAAQSLVPPPGLPGSSTPGVLPYFPPGLPPPDAGGAPQSSMSESPDVNLVTQQLSKSQVEDPLPPVFSGTPKGSGAGYGVGFDLEEFLNQSFDMGVADGPQDGQADSASLSASLLADWLEGHGMNPADIESLQREIQMDSPMLLADLPDLQDP

SEQ ID NO: 107 - DNA, 2669 bp, Homo Sapiens
  CDS (199)...(2244)
gagtgccgcttcctgggctagagacaagcaccagcctgcagtggagaacgcaggaccccgctgcccagaaggagcagccacggcctgcggaggactggcccagcaaggtcccaggtcttccctctcctcagcgcctaagagagaggcccagtgcgggtgaggagtcgcgaggaagaggcggaaggcgccggaaggaccatgttccgcaagaaaaagaagaaacgccctgagatctcagcgccacagaacttccagcaccgtgtccacacctccttcgaccccaaagaaggcaagtttgtgggcctccccccacaatggcagaacatcctggacacactgcggcgccccaagcccgtggtggacccttcgcgaatcacacgggtgcagctccagcccatgaagacagtggtgcggggcagcgcgatgcctgtggatggctacatctcggggctgctcaacgacatccagaagttgtcagtcatcagctccaacaccctgcgtggtcgcagccccaccagccggcggcgggcacagtccctggggctgctgggggatgagcactgggccaccgacccagacatgtacctccagagcccccagtctgagcgcactgacccccacggcctctacctcagctgcaacgggggcacaccagcaggccacaagcagatgccgtggcccgagccacagagcccacgggtcctgcccaatgggctggctgcaaaggcacagtccctgggccccgccgagtttcagggtgcctcgcagcgctgtctgcagctgggtgcctgcctgcagagctccccaccaggagcctcgccccccacgggcaccaataggcatggaatgaaggctgccaagcatggctctgaggaggcccggccacagtcctgcctggtgggctcagccacaggcaggccaggtggggaaggcagccctagccctaagacccgggagagcagcctgaagcgcaggctattccgaagcatgttcctgtccactgctgccacagcccctccaagcagcagcaagccaggccctccaccacagagcaagcccaactcctctttccgaccgccgcagaaagacaaccccccaagcctggtggccaaggcccagtccttgccctcggaccagccggtggggaccttcagccctctgaccacttcggataccagcagcccccagaagtccctccgcacagccccggccacaggccagcttccaggccggtcttccccagcgggatccccccgcacctggcacgcccagatcagcaccagcaacctgtacctgccccaggaccccacggttgccaagggtgccctggctggtgaggacacaggtgttgtgacacatgagcagttcaaggctgcgctcaggatggtggtggaccagggtgacccccggctgctgctggacagctacgtgaagattggcgagggctccaccggcatcgtctgcttggcccgggagaagcactcgggccgccaggtggccgtcaagatgatggacctcaggaagcagcagcgcagggagctgctcttcaacgaggtggtgatcatgcgggactaccagcacttcaacgtggtggagatgtacaagagctacctggtgggagaggagctgtgggtgctcatggagttcctgcagggaggagccctcacagacatcgtctcccaagtcaggctgaatgaggagcagattgccactgtgtgtgaggctgtgctgcaggccctggcctacctgcatgctcagggtgtcatccaccgggacatcaagagtgactccatcctgctgaccctcgatggcagggtgaagctctcggacttcggattctgtgctcagatcagcaaagacgtccctaagaggaagtccctggtgggaaccccctactggatggctcctgaagtgatctccaggtctttgtatgccactgaggtggatatctggtctctgggcatcatggtgattgagatggtagatggggagccaccgtacttcagtgactccccagtgcaagccatgaagaggctccgggacagccccccacccaagctgaaaaactctcacaaggtctccccagtgctgcgagacttcctggagcggatgctggtgcgggacccccaagagagagccacagcccaggagctcctagaccaccccttcctgctgcagacagggctacctgagtgcctggtgcccctgatccagctctaccgaaagcagacctccacctgctgagcccaccccaagtatgcctgccacctacgcccacaggcagggcacactgggcagccagcctgccggcaggacttgcctgcctcctcctctcagtattctctccaaagattgaaatgtgaagccccagccccaccctctgcccttcagcctactgggccaggccggacctgccccctcagtgtctctccctcccgagtccccaagatggagacccctttctacaggatgaccccttgatatttgcacagggatatttctaagaaacgcagaggccagcgttcctggcctctgcagccaacacagtagaaaaggctgctgtggttttttaaaggcagttgtccactagtgtcctaggccactgcagagggcagactgctggtctccacagatacctgctgttctcagctccagcttcaaacctcgag

SEQ ID NO: 108 - protein, 681 aa, Homo Sapiens
MFRKKKKKRPEISAPQNFQHRVHTSFDPKEGKFVGLPPQWQNILDTLRRPKPVVDPSRITRVQLQPMKTVVRGSAMPVDGYISGLLNDIQKLSVISSNTLRGRSPTSRRRAQSLGLLGDEHWATDPDMYLQSPQSERTDPHGLYLSCNGGTPAGHKQMPWPEPQSPRVLPNGLAAKAQSLGPAEFQGASQRCLQLGACLQSSPPGASPPTGTNRHGMKAAKHGSEEARPQSCLVGSATGRPGGEGSPSPKTRESSLKRRLFRSMFLSTAATAPPSSSKPGPPPQSKPNSSFRPPQKDNPPSLVAKAQSLPSDQPVGTFSPLTTSDTSSPQKSLRTAPATGQLPGRSSPAGSPRTWHAQISTSNLYLPQDPTVAKGALAGEDTGVVTHEQFKAALRMVVDQGDPRLLLDSYVKIGEGSTGIVCLAREKHSGRQVAVKMMDLRKQQRRELLFNEVVIMRDYQHFNVVEMYKSYLVGEELWVLMEFLQGGALTDIVSQVRLNEEQIATVCEAVLQALAYLHAQGVIHRDIKSDSILLTLDGRVKLSDFGFCAQISKDVPKRKSLVGTPYWMAPEVISRSLYATEVDIWSLGIMVIEMVDGEPPYFSDSPVQAMKRLRDSPPPKLKNSHKVSPVLRDFLERMLVRDPQERATAQELLDHPFLLQTGLPECLVPLIQLYRKQTSTC

SEQ ID NO: 109 - DNA, 2160 bp, Homo Sapiens
  CDS (95)...(928)
gctccagtcgcctccgacctcggcgctgggcgggcgcgccgggcctggggaaggggcgggcgcggggacccgatgcgcgggagcggaggccgagatggcttcggcgggaggcgaagactgcgagagccccgcgccggaggccgaccgtccgcaccagcggcccttcctgataggggtgagcggcggcactgccagcgggaagtcgaccgtgtgtgagaagatcatggagttgctgggacagaacgaggtggaacagcggcagcggaaggtggtcatcctgagccaggacaggttctacaaggtcctgacggcagagcagaaggccaaggccttgaaaggacagtacaattttgaccatccagatgcctttgataatgatttgatgcacaggactctgaagaacatcgtggagggcaaaacggtggaggtgccgacctatgattttgtgacacactcaaggttaccagagaccacggtggtctaccctgcggacgtggttctgtttgagggcatcttggtgttctacagccaggagatccgggacatgttccacctgcgcctcttcgtggacaccgactccgacgtcaggctgtctcgaagagttctccgggacgtgcgccgagggagggacctggagcagattctgacgcagtacaccaccttcgtgaagccggccttcgaggagttctgcctgccgacaaagaagtatgccgatgtgatcatcccacgaggagtggacaatatggttgccatcaacctgatcgtgcagcacatccaggacattctgaatggtgacatctgcaaatggcaccgaggagggtccaatgggcggagctacaagcggaccttttctgagccaggggaccaccctgggatgctgacctctggcaaacggtcacatttggagtccagcagcagaccccactgaggggctgccgagcctcagggcaggtctcccgcccggcatgtgtgttcagggactgagcctggggacgcccacccacacccactgcttcctctcggcgcaccccaggggagtgttagcagcgaggccttcctcactcaggagtggaaactcagatgtgtcactcagactcaacttgctgggacactgacaggcgttcctgaggttttcagccacttaggctcgttgcggtttaaagatccctctaggtcactgagaaatgccacagaatgtgcaggaagcctgggaggcttctgtgaggaatgtgaggcacattattggggaaattgaggagacagcctagacactggctggcctgatgttttgttgacagtgaacccacagtgggagagagttttttccagtctgatctggttcttacacacacacataactcaaaagttttgtgaacaagtactttccttttttacatgttacatgtcctcatgttttctgttttctgtttcataacacaaggctggttgtggcctacaaacctaatttcatgacccagtggtttgcagtccagcgtggcctacacggatatggggagccactgagggatgttttccccccttgcttgtgccttaaaggcagagaagcgaggcggatgccctggaagcacccagcatcacacccaggcttgtgcggggccaggctgggagcccatgcagtagggcagaaggcagcggaggccaggtctgtcccggctggagaacagcgtccacgcagtcctgcctggggtcaggccctcactgaccctcaggggagcccccaaggtgctgtctgtctagacaggctgtcccaccccagggtggctagtggccatatgcagggaatggtgcttctggctgtggcacgcactggatcacccaggtcccagcagacatggccgcccaaagtcagcaagcctcctttgtgctatgtggagctcacagcctcacatgtgaacacccgtgtctgggttgcctggggtgatcctccctcctgcgtggtggctgtctctggaaagcatcccttgccgctgccacgggcagccccagcccccgtccgtccaggctcacccacagtagtgatgcagacgtgacgtgggggaagggggctgagccctgtggctgggttctgacaactgtaacggttttgtcgagcttaggcccctttggagggagaatcaataaataacaaacaccaactac

SEQ ID NO: 110 - protein, 277 aa, Homo Sapiens
MASAGGEDCESPAPEADRPHQRPFLIGVSGGTASGKSTVCEKIMELLGQNEVEQRQRKVVILSQDRFYKVLTAEQKAKALKGQYNFDHPDAFDNDLMHRTLKNIVEGKTVEVPTYDFVTHSRLPETTVVYPADVVLFEGILVFYSQEIRDMFHLRLFVDTDSDVRLSRRVLRDVRRGRDLEQILTQYTTFVKPAFEEFCLPTKKYADVIIPRGVDNMVAINLIVQHIQDILNGDICKWHRGGSNGRSYKRTFSEPGDHPGMLTSGKRSHLESSSRPH

SEQ ID NO: 111 - DNA, 2162 bp, Homo Sapiens
  CDS (76)...(1821)
cacgcgtccgcccacgcgtccgcgccggtggtggcggcagcggcggctgcgggggcaccgggccgcggcgccaccatggcggtgcgacaggcgctgggccgcggcctgcagctgggtcgagcgctgctgctgcgcttcacgggcaagcccggccgggcctacggcttggggcggccgggcccggcggcgggctgtgtccgcggggagcgtccaggctgggccgcaggaccgggcgcggagcctcgcagggtcgggctcgggctccctaaccgtctccgcttcttccgccagtcggtggccgggctggcggcgcggttgcagcggcagttcgtggtgcgggcctggggctgcgcgggcccttgcggccgggcagtctttctggccttcgggctagggctgggcctcatcgaggaaaaacaggcggagagccggcgggcggtctcggcctgtcaggagatccaggcaatttttacccagaaaagcaagccggggcctgacccgttggacacgagacgcttgcagggctttcggctggaggagtatctgatagggcagtccattggtaagggctgcagtgctgctgtgtatgaagccaccatgcctacattgccccagaacctggaggtgacaaagagcaccgggttgcttccagggagaggcccaggtaccagtgcaccaggagaagggcaggagcgagctccgggggcccctgccttccccttggccatcaagatgatgtggaacatctcggcaggttcctccagcgaagccatcttgaacacaatgagccaggagctggtcccagcgagccgagtggccttggctggggagtatggagcagtcacttacagaaaatccaagagaggtcccaagcaactagcccctcaccccaacatcatccgggttctccgcgccttcacctcttccgtgccgctgctgccaggggccctggtcgactaccctgatgtgctgccctcacgcctccaccctgaaggcctgggccatggccggacgctgttcctcgttatgaagaactatccctgtaccctgcgccagtacctttgtgtgaacacacccagcccccgcctcgccgccatgatgctgctgcagctgctggaaggcgtggaccatctggttcaacagggcatcgcgcacagagacctgaaatccgacaacatccttgtggagctggacccagacggctgcccctggctggtgatcgcagattttggctgctgcctggctgatgagagcatcggcctgcagttgcccttcagcagctggtacgtggatcggggcggaaacggctgtctgatggccccagaggtgtccacggcccgtcctggccccagggcagtgattgactacagcaaggctgatgcctgggcagtgggagccatcgcctatgaaatcttcgggcttgtcaatcccttctacggccagggcaaggcccaccttgaaagccgcagctaccaagaggctcagctacctgcactgcccgagtcagtgcctccagacgtgagacagttggtgagggcactgctccagcgagaggccagcaagagaccatctgcccgagtagccgcaaatgtgcttcatctaagcctctggggtgaacatattctagccctgaagaatctgaagttagacaagatggttggctggctcctccaacaatcggccgccactttgttggccaacaggctcacagagaagtgttgtgtggaaacaaaaatgaagatgctctttctggctaacctggagtgtgaaacgctctgccaggcagccctcctcctctgctcatggagggcagccctgtgatgtccctgcatggagctggtgaattactaaaagaacttggcatcctctgtgtcgtgatggtctgtgaatggtgagggtgggagtcaggagacaagacagcgcagagagggctggttagccggaaaaggcctcgggcttggcaaatggaagaacttgagtgagagttcagtctgcagtcctgtgctcacagacatccgaaaagtgaatggccaagctggtctagtagatgaggctggactgaggaggggtaggcctgcatccacagagaggatccaggccaaggcactggctgtcagtggcagagtttggctgtgacctttgcccctaacacgaggaactcg

SEQ ID NO: 112 - protein, 581 aa, Homo Sapiens
MAVRQALGRGLQLGRALLLRFTGKPGRAYGLGRPGPAAGCVRGERPGWAAGPGAEPRRVGLGLPNRLRFFRQSVAGLAARLQRQFVVRAWGCAGPCGRAVFLAFGLGLGLIEEKQAESRRAVSACQEIQAIFTQKSKPGPDPLDTRRLQGFRLEEYLIGQSIGKGCSAAVYEATMPTLPQNLEVTKSTGLLPGRGPGTSAPGEGQERAPGAPAFPLAIKMMWNISAGSSSEAILNTMSQELVPASRVALAGEYGAVTYRKSKRGPKQLAPHPNIIRVLRAFTSSVPLLPGALVDYPDVLPSRLHPEGLGHGRTLFLVMKNYPCTLRQYLCVNTPSPRLAAMMLLQLLEGVDHLVQQGIAHRDLKSDNILVELDPDGCPWLVIADFGCCLADESIGLQLPFSSWYVDRGGNGCLMAPEVSTARPGPRAVIDYSKADAWAVGAIAYEIFGLVNPFYGQGKAHLESRSYQEAQLPALPESVPPDVRQLVRALLQREASKRPSARVAANVLHLSLWGEHILALKNLKLDKMVGWLLQQSAATLLANRLTEKCCVETKMKMLFLANLECETLCQAALLLCSWRAAL

SEQ ID NO: 113 - DNA, 960 bp, Homo Sapiens
  CDS (7)...(945)
cccggcatggaggaggagtgccgggtgctctccatacagagccacgtcatccgcggctacgtgggcaaccgggcggccacgttcccgctgcaggttttgggatttgagattgacgcggtgaactctgtccagttttcaaaccacacaggctatgcccactggaagggccaagtgctgaattcagatgagctccaggagttgtacgaaggcctgaggctgaacaacatgaataaatatgactacgtgctcacaggttatacgagggacaagtcgttcctggccatggtggtggacattgtgcaggagctgaagcagcagaaccccaggctggtgtacgtgtgtgatccagtcttgggtgacaagtgggacggcgaaggctcgatgtacgtcccggaggacctccttcccgtctacaaagaaaaagtggtgccgcttgcagacattatcacgcccaaccagtttgaggccgagttactgagtggccggaagatccacagccaggaggaagccttgcgggtgatggacatgctgcactctatgggccccgacaccgtggtcatcaccagctccgacctgccctccccgcagggcagcaactacctgattgtgctggggagtcagaggaggaggaatcccgctggctccgtggtgatggaacgcatccggatggacattcgcaaagtggacgccgtctttgtgggcactggggacctgtttgctgccatgctcctggcgtggacacacaagcaccccaataacctcaaggtggcctgtgagaagaccgtgtctaccttgcaccacgttctgcagaggaccatccagtgtgcaaaagcccaggccggggaaggagtgaggcccagccccatgcagctggagctgcggatggtgcagagcaaaagggacatcgaggacccagagatcgtcgtccaggccacggtgctgtgagggccccgccgcttg

SEQ ID NO: 114 - protein, 312 aa, Homo Sapiens
MEEECRVLSIQSHVIRGYVGNRAATFPLQVLGFEIDAVNSVQFSNHTGYAHWKGQVLNSDELQELYEGLRLNNMNKYDYVLTGYTRDKSFLAMVVDIVQELKQQNPRLVYVCDPVLGDKWDGEGSMYVPEDLLPVYKEKVVPLADIITPNQFEAELLSGRKIHSQEEALRVMDMLHSMGPDTVVITSSDLPSPQGSNYLIVLGSQRRRNPAGSVVMERIRMDIRKVDAVFVGTGDLFAAMLLAWTHKHPNNLKVACEKTVSTLHHVLQRTIQCAKAQAGEGVRPSPMQLELRMVQSKRDIEDPEIVVQATVL

SEQ ID NO: 115 - DNA, 1075 bp, Homo Sapiens
  CDS (1)...(1065)
atggggaagctcgtggcgctggtcctgctgggggtcggcctgtccttagtcggggagatgttcctggcgtttagagaaagggtgaatgcctctcgagaagtggagccagtagaacctgaaaactgccaccttattgaggaacttgaaagtggctctgaagatattgatatacttcctagtgggctggcttttatctccagtggattaaaatatccaggcatgccaaactttgcgccagatgaaccaggaaaaatcttcttgatggatctgaatgaacaaaacccaagggcacaagcactagaaatcagtggtggatttgacaaagaattatttaatccacatgggatcagtattttcatcgacaaagacaatactgtgtatctttatgttgtgaatcatccccacatgaagtccactgtggagatatttaaatttgaggaacaacaacgttctctggtatacctgaaaactataaaacatgaacttctcaaaagtgtgaatgacattgtggttcttggaccagaacagttctatgccaccagagaccactattttaccaactccctcctgtcattttttgagatgatcttggatcttcgctggacttatgttcttttctacagcccaagggaggttaaagtggtggccaaaggattttgtagtgccaatgggatcacagtctcagcagaccagaagtatgtctatgtagctgatgtagcagctaagaacattcacataatggaaaaacatgataactgggatttaactcaactgaaggtgatacagttgggcaccttagtggataacctgactgtcgatcctgccacaggagacattttggcaggatgccatcctaatcctatgaagctactgaactataaccctgaggaccctccaggatcagaagtacttcgcatccagaatgttttgtctgagaagcccagggtgagcaccgtgtatgccaacaatggctctgtgcttcagggcacctctgtggcttctgtgtaccatgggaaaattctcataggcaccgtatttcacaaaactctgtactgtgagctctagactctagata

SEQ ID NO: 116 - protein, 354 aa, Homo Sapiens
MGKLVALVLLGVGLSLVGEMFLAFRERVNASREVEPVEPENCHLIEELESGSEDIDILPSGLAFISSGLKYPGMPNFAPDEPGKIFLMDLNEQNPRAQALEISGGFDKELFNPHGISIFIDKDNTVYLYVVNHPHMKSTVEIFKFEEQQRSLVYLKTIKHELLKSVNDIVVLGPEQFYATRDHYFTNSLLSFFEMILDLRWTYVLFYSPREVKVVAKGFCSANGITVSADQKYVYVADVAAKNIHIMEKHDNWDLTQLKVIQLGTLVDNLTVDPATGDILAGCHPNPMKLLNYNPEDPPGSEVLRIQNVLSEKPRVSTVYANNGSVLQGTSVASVYHGKILIGTVFHKTLYCEL

SEQ ID NO: 117 - DNA, 1627 bp, Homo Sapiens
  CDS (262)...(1380)
ctccgctgctgtcgccaggagtcacttcacgagaagccaggtcacaaccgtcggcccttgtctggaaaagtaaaagtggatcctgccacgttcggagctccctggcgcctcgcccggctggagctagagaactcgtcctgtggcggcccccggcgtggggcgggacagcggccccctggagggggcagtcccgggagaacctgcggcggccggagcggtaaaaataagtgactaaagaagcagacctgggaatcacctaacatgtcgaggaggagatttgattgccgaagtatttcaggcctactaactacaactcctcaaattccaataaaaatggaaaactttaataatttctatatacttacatctaaagagctagggagaggaaaatttgctgtggttagacaatgtatatcaaaatctactggccaagaatatgctgcaaaatttctaaaaaagagaagaagaggacaggattgtcgggcagaaattttacacgagattgctgtgcttgaattggcaaagtcttgtccccgtgttattaatcttcatgaggtctatgaaaatacaagtgaaatcattttgatattggaatatgctgcaggtggagaaattttcagcctgtgtttacctgagttggctgaaatggtttctgaaaatgatgttatcagactcattaaacaaatacttgaaggagtttattatctacatcagaataacattgtacaccttgatttaaagccacagaatatattactgagcagcatataccctctcggggacattaaaatagtagattttggaatgtctcgaaaaatagggcatgcgtgtgaacttcgggaaatcatgggaacaccagaatatttagctccagaaatcctgaactatgatcccattaccacagcaacagatatgtggaatattggtataatagcatatatgttgttaactcacacatcaccatttgtgggagaagataatcaagaaacatacctcaatatttctcaagttaatgtagattattcggaagaaactttttcatcagtttcacagctggccacagactttattcagagccttttagtaaaaaatccagagaaaagaccaacagcagagatatgcctttctcattcttggctacagcagtgggactttgaaaacttgtttcaccctgaagaaacttccagttcctctcaaactcaggatcattctgtaaggtcctctgaagacaagacttctaaatcctcctgtaatggaacctgtggtgatagagaagacaaagagaatatcccagaggatagcagcatggtttccaaaagatttcgtttcgatgactcattacccaatccccatgaacttgtttcagatttgctctgttagcacttttttctttgactcatttggactgaatttgaaattttatatccactccagtgagattatgatttgtagcttcatatatgacatgtttatattgtaaatgcacttttccatggaataatttagggaagtgttttaatgttaaattactagttgctagcatgttatgatttcatatcctgagatagctctgcagataagaaaatatttaaatatatgacaaaaagtaaaattgtacatgtgaaag

SEQ ID NO: 118 - protein, 372 aa, Homo Sapiens
MSRRRFDCRSISGLLTTTPQIPIKMENFNNFYILTSKELGRGKFAVVRQCISKSTGQEYAAKFLKKRRRGQDCRAEILHEIAVLELAKSCPRVINLHEVYENTSEIILILEYAAGGEIFSLCLPELAEMVSENDVIRLIKQILEGVYYLHQNNIVHLDLKPQNILLSSIYPLGDIKIVDFGMSRKIGHACELREIMGTPEYLAPEILNYDPITTATDMWNIGIIAYMLLTHTSPFVGEDNQETYLNISQVNVDYSEETFSSVSQLATDFIQSLLVKNPEKRPTAEICLSHSWLQQWDFENLFHPEETSSSSQTQDHSVRSSEDKTSKSSCNGTCGDREDKENIPEDSSMVSKRFRFDDSLPNPHELVSDLLC

SEQ ID NO: 119 - DNA, 2493 bp, Homo Sapiens
  CDS (402)...(2060)
acgcgtccggcacagcctcggattcctccctctcgctgctcgagtcagtttccctatcggcggcagcgggcaaggcggcggcggcggcggcggcagccgcggtggcggcgtggggaacatctcggcagccaccgcgcttctcccgctggagcgggcgtccagcttggctgccctcggtccttccctgccacgtttcgggtcgccctgcaccccccacccaggctcgcttctcttcgaagcgggaagggcgccttgcaggatcctgccgcccctccaaccggatcctgggtctagagctccccagagcgaggcgctcgccaggactcctgccccgccaaccctgaccgccggggggtgcccccgggacgtagcgccgcggagaggaagcggcaaaggggaccatgcggcgcctgactcgtcggctggttctgccagtcttcggggtgctctggatcacggtgctgctgttcttctgggtaaccaagaggaagttggaggtgccgacgggacctgaagtgcagacccctaagccttcggacgctgactgggacgacctgtgggaccagtttgatgagcggcggtatctgaatgccaaaaagtggcgcgttggtgacgacccctataagctgtatgctttcaaccagcgggagagtgagcggatctccagcaatcgggccatcccggacactcgccatctgagatgcacactgctggtgtattgcacggaccttccacccactagcatcatcatcaccttccacaacgaggcccgctccacgctgctcaggaccatccgcagtgtattaaaccgcacccctacgcatctgatccgggaaatcatattagtggatgacttcagcaatgaccctgatgactgtaaacagctcatcaagttgcccaaggtgaaatgcttgcgcaataatgaacggcaaggtctggtccggtcccggattcggggcgctgacatcgcccagggcaccactctgactttcctcgacagccactgtgaggtgaacagggactggctccagcctctgttgcacagggtcaaagaggactacacgcgggtggtgtgccctgtgatcgatatcattaacctggacaccttcacctacatcgagtctgcctcggagctcagaggggggtttgactggagcctccacttccagtgggagcagctctccccagagcagaaggctcggcgcctggaccccacggagcccatcaggactcctatcatagctggagggctcttcgtgatcgacaaagcttggtttgattacctggggaaatatgatatggacatggacatctggggtggggagaactttgaaatctccttccgagtgtggatgtgcgggggcagcctagagatcgtcccctgcagccgagtggggcacgtcttccggaagaagcacccctacgttttccctgatggaaatgccaacacgtatataaagaacaccaagcggacagctgaagtgtggatggatgaatacaagcaatactattacgctgcccggccattcgccctggagaggcccttcgggaatgttgagagcagattggacctgaggaagaatctgcgctgccagagcttcaagtggtacctggagaatatctaccctgaactcagcatccccaaggagtcctccatccagaagggcaatatccgacagagacagaagtgcctggaatctcaaaggcagaacaaccaagaaaccccaaacctaaagttgagcccctgtgccaaggtcaaaggcgaagatgcaaagtcccaggtatgggccttcacatacacccagcagatcctccaggaggagctgtgcctgtcagtcatcaccttgttccctggcgccccagtggttcttgtcctttgcaagaatggagatgaccgacagcaatggaccaaaactggttcccacatcgagcacatagcatcccacctctgcctcgatacagatatgttcggtgatggcaccgagaacggcaaggaaatcgtcgtcaacccatgtgagtcctcactcatgagccagcactgggacatggtgagctcttgaggacccctgccagaagcagcaagggccatggggtggtgcttccctggaccagaacagactggaaactgggcagcaagcagcctgcaaccacctcagacatcctggactgggaggtggaggcagagccccccaggacaggagcaactgtctcagggaggacagaggaaaacatcacaagccaatggggctcaaagacaaatcccacatgttctcaaggccgttaagttccagtcctggccagtcattccctgattggtatctggagacagaaacctaatgggaagtgtttattgttccttttcctacaaaggaagcagtctctggaggccagaaagaaaagccttctttttcactaggccaggactacattgagagatgaagaatggaggttgtttccaaaagaaataaagagaaacttagaagttgtctctgg

SEQ ID NO: 120 - protein, 552 aa, Homo Sapiens
MRRLTRRLVLPVFGVLWITVLLFFWVTKRKLEVPTGPEVQTPKPSDADWDDLWDQFDERRYLNAKKWRVGDDPYKLYAFNQRESERISSNRAIPDTRHLRCTLLVYCTDLPPTSIIITFHNEARSTLLRTIRSVLNRTPTHLIREIILVDDFSNDPDDCKQLIKLPKVKCLRNNERQGLVRSRIRGADIAQGTTLTFLDSHCEVNRDWLQPLLHRVKEDYTRVVCPVIDIINLDTFTYIESASELRGGFDWSLHFQWEQLSPEQKARRLDPTEPIRTPIIAGGLFVIDKAWFDYLGKYDMDMDIWGGENFEISFRVWMCGGSLEIVPCSRVGHVFRKKHPYVFPDGNANTYIKNTKRTAEVWMDEYKQYYYAARPFALERPFGNVESRLDLRKNLRCQSFKWYLENIYPELSIPKESSIQKGNIRQRQKCLESQRQNNQETPNLKLSPCAKVKGEDAKSQVWAFTYTQQILQEELCLSVITLFPGAPVVLVLCKNGDDRQQWTKTGSHIEHIASHLCLDTDMFGDGTENGKEIVVNPCESSLMSQHWDMVSS

SEQ ID NO: 121 - DNA, 2287 bp, Homo Sapiens
  CDS (15)...(935)
gtgacacagcgaagatggcgtcgcccggctgcctgtggctcttggctgtggctctcctgccatggacctgcgcttctcgggcgctgcagcatctggacccgccggcgccgctgccgttggtgatctggcatgggatgggagacagctgttgcaatcccttaagcatgggtgctattaaaaaaatggtggagaagaaaatacctggaatttacgtcttatctttagagattgggaagaccctgatggaggacgtggagaacagcttcttcttgaatgtcaattcccaagtaacaacagtgtgtcaggcacttgctaaggatcctaaattgcagcaaggctacaatgctatgggattctcccagggaggccaatttctgagggcagtggctcagagatgcccttcacctcccatgatcaatctgatctcggttgggggacaacatcaaggtgtttttggactccctcgatgcccaggagagagctctcacatctgtgacttcatccgaaaaacactgaatgctggggcgtactccaaagttgttcaggaacgcctcgtgcaagccgaatactggcatgaccccataaaggaggatgtgtatcgcaaccacagcatcttcttggcagatataaatcaggagcggggtatcaatgagtcctacaagaaaaacctgatggccctgaagaagtttgtgatggtgaaattcctcaatgattccattgtggaccctgtagattcggagtggtttggattttacagaagtggccaagccaaggaaaccattcccttacaggagacctccctgtacacacaggaccgcctggggctaaaggaaatggacaatgcaggacagctagtgtttctggctacagaaggggaccatcttcagttgtctgaagaatggttttatgcccacatcataccattccttggatgaaacccgtatagttcacaatagagctcagggagcccctaactcttccaaaccacatgggagacagtttccttcatgcccaagcctgagctcagatccagcttgcaactaatccttctatcatctaacatgccctacttggaaagatctaagatctgaatcttatcctttgccatcttctgttaccatatggtgttgaatgcaagtttaattaccatggagattgttttacaaacttttgatgtggtcaagttcagttttagaaaagggagtctgttccagatcagggccagaactgtgcccaggcccaaaggagacaactaactaaagtagtgagatagattctaagggcaaacatttttccaagtcttgccatatttcaagcaaagaggtgcccaggcctgaggtactcacataaatgctttgttttgctggtgatttaaccagtgcttggaaaaatcttgcttggctatttctgcatcatttcttaaggctgccttcctctctgagtacgttgccctctgtgctatcaatcatcttatcatcaattattagacaaatcccactggcctacagtcttgcttctgcagcacccactttgtctcctcaggtagtgatgaattagttgctgtcacaaaaggagggaagtagcacccaaattaaattgcttaagagaggaaatgtacatcttgtataacttagggagcgaagaaaatgtaggcgcgaaagtgaaaagtgaggcagctagttcttcctattccattctcgaccaacctgccctttcttaatatgactagtggtcttgatgctagagtcaacttactctgttgctggctttagcagagaataggaggaaccatatgaaaaagatcaggctttctgacttccatccccaaaacacatttaccagcatactccaaactgtttctgatgtgttccatgagaaaaggattgtttgctcaaaaagcttggaaaatactacacactccctttctccttctggagatcaacccacattagagtgtctaaggactcctgagaattcctgttacagtaaacaaaactaacgtaatctaccatttcctacactatttgagcatggaaatcatagtccccactctgtgaaaacttaacgctttttggaagacatttctgtagcatgtcagtttggagaaatgatgagctacgccttgatgaaagaaccgtgttggtgctgctaagtttagccattatggtttttcctttctctctcttaagccttattcttcaactaaaagatgaggattaagagcaagaagttgggggggatgtgaaaataattttatgaggttgtctaaaataaagagtagtttctt

SEQ ID NO: 122 - protein, 306 aa, Homo Sapiens
MASPGCLWLLAVALLPWTCASRALQHLDPPAPLPLVIWHGMGDSCCNPLSMGAIKKMVEKKIPGIYVLSLEIGKTLMEDVENSFFLNVNSQVTTVCQALAKDPKLQQGYNAMGFSQGGQFLRAVAQRCPSPPMINLISVGGQHQGVFGLPRCPGESSHICDFIRKTLNAGAYSKVVQERLVQAEYWHDPIKEDVYRNHSIFLADINQERGINESYKKNLMALKKFVMVKFLNDSIVDPVDSEWFGFYRSGQAKETIPLQETSLYTQDRLGLKEMDNAGQLVFLATEGDHLQLSEEWFYAHIIPFLG

SEQ ID NO: 123 - DNA, 1429 bp, Homo Sapiens
  CDS (69)...(1247)
aaagaacccagccaacccgcagagggaggggaggggctgagctgtgaggagagcggggcccaagaaccatgtctacgcgggagtcctttaacccggaaagttacgaattggacaaaagcttccggctaaccagattcactgaactgaagggcacaggctgcaaagtgccccaagatgtcctgcaaaaattgctggaatctttacaggagaaccacttccaagaagatgagcagtttctgggagccgttatgccaaggcttggcattggaatggatacttgtgtcattcctttgaggcacggtgggctttccttggttcaaaccacagattacatttacccgatcgtagacgacccttacatgatgggcaggatagcgtgtgccaatgtcctcagtgacctctatgcaatgggggtcacggaatgtgacaatatgctgatgctccttggagtcagtaataaaatgaccgacagggaaagggataaagtgatgcctctgattatccaaggttttaaagacgcagctgaggaagcaggaacatctgtaacaggcggccaaacagtactaaacccctggattgtcctgggaggagtggctaccactgtctgccaacccaatgaatttatcatgccagacaatgcagtgccaggggacgtgctggtgctgacaaaacccctggggacacaggtggcagtggctgtgcaccagtggctggatatccctgagaaatggaataagattaaactagtggtcacccaagaagatgtagagctggcctaccaggaggcgatgatgaacatggcgaggctcaacaggacagctgcaggactcatgcacacgttcaatgcccacgccgccactgacatcacgggcttcgggattttgggccatgcgcagaacctggccaagcagcagaggaacgaggtgtcgtttgtaattcacaacctcccggtgctggccaagatggctgcggtgagcaaggcctgcggaaacatgttcggcctcatgcacgggacctgcccggagacttcaggcggccttctgatctgtttaccacgtgagcaagcagctcggttctgtgcagagataaagtcccccaaatatggtgaaggccaccaagcatggattattgggattgtagagaagggcaaccgcacagccagaatcatagacaaaccccggatcatcgaggtcgcaccacaagtggccactcaaaatgtgaatcccacacccggggccacctcttaatctagacagaaatagctgtttggttttgtttttaaatagatctatttcccttatcacttcaattaaagactataaacaacaaaaatctcattgtgtctacacatcggggtgaccttaggtcggtttgtaagtggatacaattaataaaataaaatccattgcctttttaaaaaaaaaaaaaa

SEQ ID NO: 124 - protein, 392 aa, Homo Sapiens
MSTRESFNPESYELDKSFRLTRFTELKGTGCKVPQDVLQKLLESLQENHFQEDEQFLGAVMPRLGIGMDTCVIPLRHGGLSLVQTTDYIYPIVDDPYMMGRIACANVLSDLYAMGVTECDNMLMLLGVSNKMTDRERDKVMPLIIQGFKDAAEEAGTSVTGGQTVLNPWIVLGGVATTVCQPNEFIMPDNAVPGDVLVLTKPLGTQVAVAVHQWLDIPEKWNKIKLVVTQEDVELAYQEAMMNMARLNRTAAGLMHTFNAHAATDITGFGILGHAQNLAKQQRNEVSFVIHNLPVLAKMAAVSKACGNMFGLMHGTCPETSGGLLICLPREQAARFCAEIKSPKYGEGHQAWIIGIVEKGNRTARIIDKPRIIEVAPQVATQNVNPTPGATS

SEQ ID NO: 125 - DNA, 1725 bp, Homo Sapiens
  CDS (281)...(1390)
  misc_feature (1)...(1725): n = A,T,C or G
gagaaggaggagccagcggaaggacggtgtgcgggccggccagccctggacgaaagaagagggcccctccaggccagtctgggcaccctgggatagcggctgcagccatcagcaggggcagacggcaggtggcctggttgctgcagctcccaggatcagctctgccctccccgcaaacgccagcctcgtcaccgctccagggcacctccagcagtaacaggtggttgcagcaggtggcagccagcccctggatgagccaaggtctcttccccagccaggcatggccgactctgcacaggcccagaagctggtgtacctggtcacagggggctgtggcttcctgggagagcacgtggtgcgaatgctgctgcagcgggagccccggctcggggagctgcgggtctttgaccaacacctgggtccctggctggaggagctgaagacagggcctgtgagggtgactgccatccagggggacgtgacccaggcccatgaggtggcagcagctgtggccggagcccatgtggtcatccacacggctgggctggtagacgtgtttggcagggccagtcccaagaccatccatgaggtcaacgtgcagggtacccggaacgtgatcgaggcttgtgtgcagaccggaacacggttcctggtctacaccagcagcatggaagttgtggggcctaacaccaaaggtcaccccttctacaggggcaacgaagacaccccatacgaagcagtgcacaggcacccctatccttgcagcaaggccctggccgagtggctggtcctggaggccaacgggaggaaggtccgtggggggctgcccctggtgacgtgtgcccttcgtcccacgggcatctacggtgaaggccaccagatcatgagggacttctaccgccagggcctgcgcctgggaggttggctcttccgggccatcccggcctctgtggagcatggccgggtctatgtgggcaatgttgcctggatgcacgtgctggcagcccgggagctggagcagcgggcagccctgatgggcggccaggtatacttctgctacgatggatcaccctacaggagctacgaggatttcaacatggagttcctgggcccctgcggactgcggctggtgggcgcccgcccattgctgccctactggctgctggtgttcctggctgccctcaatgccctgctgcagtggctgctgcggccactggtgctctacgcacccctgctgaacccctacacgctggccgtggccaacaccaccttcaccgtcagcaccgacaaggctcagcgccatttcggctatgagcccctgttctcgtgggaggatagccggacccgcaccattctctgggtacaggccgctacgggttcagcccagtgacggtggggctggggcctggaggcccagatacagcacatccacccaggtcccgagccctcacaccctggacgggaagggacagctgcattccagagcaggaggcagggctctggggccagaatggctgtccttgtcgtagagccctccacattttctttttcttttttgagacagggtcttgctctgtcacccagactggaatgcaagtggtgtgantcataagctcactngmaccctyaanccttctgggttcaagcaatccttnctngcctyaanccttctngaacaagcttggganccacaggtgcacgccanccacancctggctttttttt

SEQ ID NO: 126 - protein, 369 aa, Homo Sapiens
MADSAQAQKLVYLVTGGCGFLGEHVVRMLLQREPRLGELRVFDQHLGPWLEELKTGPVRVTAIQGDVTQAHEVAAAVAGAHVVIHTAGLVDVFGRASPKTIHEVNVQGTRNVIEACVQTGTRFLVYTSSMEVVGPNTKGHPFYRGNEDTPYEAVHRHPYPCSKALAEWLVLEANGRKVRGGLPLVTCALRPTGIYGEGHQIMRDFYRQGLRLGGWLFRAIPASVEHGRVYVGNVAWMHVLAARELEQRAALMGGQVYFCYDGSPYRSYEDFNMEFLGPCGLRLVGARPLLPYWLLVFLAALNALLQWLLRPLVLYAPLLNPYTLAVANTTFTVSTDKAQRHFGYEPLFSWEDSRTRTILWVQAATGSAQ

SEQ ID NO: 127 - DNA, 3919 bp, Homo Sapiens
  CDS (183)...(3530)
  misc_feature (1)...(3919): n = A,T,C or G
gacgggctgagactggacgggacccccggtctgcagcagcaggtgacagcagcagggacaatgataaggagattggcctgaaggagggaccgtccctcccgcgcgaaaagtcagaaatggccaatgaagcttttgcttataaaaggaatgcgatgttaattctggggcattgatgttttacaatgcctgatcaagataaaaaggtgaagaccacagaaaaatcaactgataaacagcaagaaatcaccatcagggactattcagatcttaaaagacttcggtgccttttgaacgtccaatcaagcaaacaacagcttccagccattaacttcgatagtgcccaaaatagcatgacgaagtctgagcccgccatcagggcgggtggacacagagctcggggtcagtggcatgaatccacagaagctgttgaacttgaaaattttagtataaactacaagaatgagagaaatttcagcaaacatcctcagcgtaaactatttcaggagatctttaccgccttggtgaaaaatagactcataagcagagagtgggttaatcgagccccatctattcattttctgagagtgttaatctgtctgaggctactaatgagggatccatgttatcaggaaatactccatagcttgggtgggattgaaaacctagctcagtatatggagattgtagccaatgagtacctcggctatggagaagagcagcacactgtggacaagctggtcaacatgacatatatttttcaaaaacttgctgcagtcaaagatcaaagagaatgggtcaccacaagtggagcccacaagacattagtaaatttacttggtgcccgagatactaatgttctattgggttcccttctggctctggctagtttagcagaaagtcaagaatgtagggagaagataagtgaactcaacattgtagaaaatctgttgatgattttacatgaatatgacttgctttctaaaagactaacagcggagttgctgcgcctactttgtgcagagccccaggtgaaagagcaggtgaagctctatgaggggataccggtcctcctcagtctgctccactctgaccacttgaagctcctctggagcattgtctggattctggtacaggtttgtgaggaccctgagaccagcgtggaaattcgcatttggggaggcatcaaacagcttcttcatattttacaaggagacagaaattttgtttctgatcactcctccattggaagcctgtccagtgcaaatgctgcaggccgaatccagcagcttcatttatcagaagacttgagccctagggaaatacaagaaaatactttctcacttcaagcagcctgctgtgctgccctcactgagctggtgctcaatgacaccaatgcccaccaggtggttcaggaaaatggtgtatatacaatagcaaaattaattttaccaaataagcaaaagaatgcagcaaaaagtaatctattacagtgttatgctttcagagccttgagatttctcttcagtatggaaagaaacagaccactctttaaaagacttttccccacagacttgtttgagatcttcattgacatagggcattatgtacgtgatatcagtgcttatgaagaattggtatccaagctgaatttattagtggaggatgaactgaagcaaattgctgaaaatattgaaagcattaatcagaacaaagctccttcgaaatatataggcaactatgcaattttggatcatcttggaagtggagcttttggctgtgtttacaaggttagaaagcatagtggtcaaaatcttttagcaatgaaagaggtcaatttacataacccagcatttggaaaggataagaaagatcgagacagcagcgtaaggaatattgtttctgaattaacaataattaaagagcagctttatcatcccaacattgtacgttattacaaaacatttctggaaaacgataggttgtacatagttatggagctgatagaaggagccccgcttggagagcatttcagttctttgaaggaaaaacatcaccattttactgaagaaagactatggaaaatatttatacagctgtgcttagctcttcgatacttacacaaggagaagaggattgtccatagagatctgacaccaaacaacattatgttgggggataaggacaaagtaacagttactgactttggcctggcaaagcaaaaacaagaaaacagtaaactcacgtctgtggttggaacaatcctgtattcttgccccgaggtactgaagagtgagccgtatggggagaaggctgatgtctgggcagtaggctgcatcctttatcagatggcgactttgagtccccccttctacagcactaacatgctgtccttggctacaaaaatagtggaggcggtatatgaaccagtgccagaaggtatctactctgaaaaagtaacagacaccatcagcaggtgcctcactcctgatgcggaagctcgtccagatattgtagaagtcagttcgatgatatcagatgtcatgatgaaatatttagacaacttatctacatcccagttgtccttggaaaagaagctagaacgggaacgaagacgcacacaaaggtattttatggaagccaaccggaacaccgtcacatgtcaccatgagctggctgttctatctcacgagacctttgagaaggcaagtttgagtagcagcagcagtggagcagccagcctgaaaagtgaactttcagaaagcgcagacctgccccctgaaggcttccaggcctcctatggtaaagacgaagacagggcctgtgacgaaatcctgtcagatgataacttcaacctggaaaatgctgagaaagatacatattcagaggtagatgatgaattggacatttcggataactccagcagctccagttcaagccctctgaaagaatctacattcaacattttaaagagaagttttagtgcttcaggaggagaaagacaatcccaaacaagggacttcactggaggaacaggatcaagaccaagaccagcatcagcaggaattgctgtgtcccagaggaaagtgcgtcagatcagtgatcctattcagcagatattaattcagctgcacaaaataatctatatcacacagcttcctccagctttgcaccacaatttgaaaagaagggttatagagagattcaagaaatccctcttcagccagcagagtaacccttgtaatttgaaatctgaaattaaaaagttatctcagggatctccagaaccgattgagcccaactttttcacagcagattaccatttattacatcgttcatccggtggaaacagcctgtccccaaatgaccctacaggtttaccaaccagcattgaattggaggaaggaataacatatgaacagatgcagactgtgattgaagaagtccttgaggaaagtggctattacaattttacatctaacaggtatcattcctatccatgggggaccaagaatcacccaaccaaaagatgaaaatgctgcattttgagtggacttgattttctcagtgaagttcaagttctggacttcagccgctattgcaagatgcccaaggattgggtgctgctagagggtgtggaaaagaccaagatgccatggggcctgcaggacttctttctgggggtcctgtgctggagtatatgacagctgcggtacttgagggcttcattgccagaacacattatatacaggatgtcagagctaccagtgtgctgctgggagaaaatgctgcaaaattcatcttttggagggtggggggaaaacccaaaaacaacaacaaaaaaactctcttacagaattttccttaacattaaaaaaaacttgtcatatttttcaaaggcncatttgatactcagaattgc

SEQ ID NO: 128 - protein, 1115 aa, Homo Sapiens
MPDQDKKVKTTEKSTDKQQEITIRDYSDLKRLRCLLNVQSSKQQLPAINFDSAQNSMTKSEPAIRAGGHRARGQWHESTEAVELENFSINYKNERNFSKHPQRKLFQEIFTALVKNRLISREWVNRAPSIHFLRVLICLRLLMRDPCYQEILHSLGGIENLAQYMEIVANEYLGYGEEQHTVDKLVNMTYIFQKLAAVKDQREWVTTSGAHKTLVNLLGARDTNVLLGSLLALASLAESQECREKISELNIVENLLMILHEYDLLSKRLTAELLRLLCAEPQVKEQVKLYEGIPVLLSLLHSDHLKLLWSIVWILVQVCEDPETSVEIRIWGGIKQLLHILQGDRNFVSDHSSIGSLSSANAAGRIQQLHLSEDLSPREIQENTFSLQAACCAALTELVLNDTNAHQVVQENGVYTIAKLILPNKQKNAAKSNLLQCYAFRALRFLFSMERNRPLFKRLFPTDLFEIFIDIGHYVRDISAYEELVSKLNLLVEDELKQIAENIESINQNKAPSKYIGNYAILDHLGSGAFGCVYKVRKHSGQNLLAMKEVNLHNPAFGKDKKDRDSSVRNIVSELTIIKEQLYHPNIVRYYKTFLENDRLYIVMELIEGAPLGEHFSSLKEKHHHFTEERLWKIFIQLCLALRYLHKEKRIVHRDLTPNNIMLGDKDKVTVTDFGLAKQKQENSKLTSVVGTILYSCPEVLKSEPYGEKADVWAVGCILYQMATLSPPFYSTNMLSLATKIVEAVYEPVPEGIYSEKVTDTISRCLTPDAEARPDIVEVSSMISDVMMKYLDNLSTSQLSLEKKLERERRRTQRYFMEANRNTVTCHHELAVLSHETFEKASLSSSSSGAASLKSELSESADLPPEGFQASYGKDEDRACDEILSDDNFNLENAEKDTYSEVDDELDISDNSSSSSSSPLKESTFNILKRSFSASGGERQSQTRDFTGGTGSRPRPASAGIAVSQRKVRQISDPIQQILIQLHKIIYITQLPPALHHNLKRRVIERFKKSLFSQQSNPCNLKSEIKKLSQGSPEPIEPNFFTADYHLLHRSSGGNSLSPNDPTGLPTSIELEEGITYEQMQTVIEEVLEESGYYNFTSNRYHSYPWGTKNHPTKR

SEQ ID NO: 129 - DNA, 3136 bp, Homo Sapiens
  CDS (108)...(2177)
gggtaccgagctcgaattccggctcggcctcgggcgcggccgagcgccgcgcgagcaggagcggcggcggcggcggcggcggcgggaggaggcagcgccggcccaagatggcggacctggaggcggtgctggccgacgtgagctacctgatggccatggagaagagcaaggccacgccggccgcgcgcgccagcaagaagatactgctgcccgagcccagcatccgcagtgtcatgcagaagtacctggaggaccggggcgaggtgacctttgagaagatcttttcccagaagctggggtacctgctcttccgagacttctgcctgaaccacctggaggaggccaggcccttggtggaattctatgaggagatcaagaagtacgagaagctggagacggaggaggagcgtgtggcccgcagccgggagatcttcgactcatacatcatgaaggagctgctggcctgctcgcatcccttctcgaagagtgccactgagcatgtccaaggccacctggggaagaagcaggtgcctccggatctcttccagccatacatcgaagagatttgtcaaaacctccgaggggacgtgttccagaaattcattgagagcgataagttcacacggttttgccagtggaagaatgtggagctcaacatccacctgaccatgaatgacttcagcgtgcatcgcatcattgggcgcgggggctttggcgaggtctatgggtgccggaagcgtgacacaggcaagatgtacgccatgaagtgcctggacaaaaagcgcatcaagatgaagcagggggagaccctggccctgaacgagcgcatcatgctctcgctcgtcagcactggggactgcccattcattgtctgcatgtcatacgcgttccacacgccagacaagctcagcttcatcctggacctcatgaacggtggggacctgcactaccacctctcccagcacggggtcttctcagaggctgacatgcgcttctatgcggccgagatcatcctgggcctggagcacatgcacaaccgcttcgtggtctaccgggacctgaagccagccaacatccttctggacgagcatggccacgtgcggatctcggacctgggcctggcctgtgacttctccaagaagaagccccatgccagcgtgggcacccacgggtacatggctccggaggtcctgcagaagggcgtggcctacgacagcagtgccgactggttctctctggggtgcatgctcttcaagttgctgcgggggcacagccccttccggcagcacaagaccaaagacaagcatgagatcgaccgcatgacgctgacgatggccgtggagctgcccgactccttctcccctgaactacactccctgctggaggggttgctgcagagggatgtcaaccggagattgggctgcctgggccgaggggctcaggaggtgaaagagagcccctttttccgctccctggactggcagatggtcttcttgcagaggtaccctcccccgctgatccccccacgaggggaggtgaacgcggccgacgccttcgacattggctccttcgatgaggaggacacaaaaggaatcaagttactggacagtgatcaggagctctaccgcaacttccccctcaccatctcggagcggtggcagcaggaggtggcagagactgtcttcgacaccatcaacgctgagacagaccggctggaggctcgcaagaaagccaagaacaagcagctgggccatgaggaagactacgccctgggcaaggactgcatcatgcatggctacatgtccaagatgggcaacccctttctgacccagtggcagcggcggtacttctacctgttccccaaccgcctcgagtggcggggcgagggcgaggccccgcagagcctgctgaccatggaggagatccagtcggtggaggagacgcagatcaaggagcgcaagtgcctgctcctcaagatccgcggtgggaaacagttcattttgcagtgcgatagcgaccctgagctggtgcagtggaagaaggagctgcgcgacgcctaccgcgaggcccagcagctggtgcagcgggtgcccaagatgaagaacaagccgcgctcgcccgtggtggagctgagcaaggtgccgctggtccagcgcggcagtgccaacggcctctgacccgcccacccgccttttataaacctctaatttattttgtcgaatttttattatttgttttcccgccaagcgaaaaggttttattttgtaattattgtgatttcccgtggccccagcctggcccagctcccccgggaggccccgcttgcctcggctcctgctgcaccaacccagccgctgcccggcgccctctgtcctgacttcaggggctgcccgctcccagtgtcttcctgtgggggaagagcacagccctcccgccccttccccgagggatgatgccacaccaagctgtgccaccctgggctctgtgggctgcacttgtgccatgggactgtgggtggcccatcccccctcaccaggggcaggcacagcacagggatccgacttgaattttcccactgcaccccctcctgctgcagaggggcaggccctgcactgtcctgctccacagtgttggcgagaggaggggcccgttgtctccctggccctcaaggctcccacagtgactcgggctcctgtgcccttattcaggaaaagcctctgtgtcactggctgcctccactcccacttccctgacactgcggggcttggctgagagagtggcattggcagcaggtgctgctaccctccctgctgtcccctcttgccccaacccccagcacccgggctcagggaccacagcaaggcacctgcaggttgggccatactggcctcgcctggcctgaggtctcgctgatgctgggctgggtgcgaccccatctgcccaggacggggccggccaggtgggcgggcagcacagcaaggaggctggctggggcctatcagtgtgccccccatcctggcccatcagtgtacccccgcccagactggccagccccacagcccacgtcctgtcagtgccgccgcctcgcccaccgcatgccccctgtgccagtgctctgcctgtgtgtgtgcactct

SEQ ID NO: 130 - protein, 689 aa, Homo Sapiens
MADLEAVLADVSYLMAMEKSKATPAARASKKILLPEPSIRSVMQKYLEDRGEVTFEKIFSQKLGYLLFRDFCLNHLEEARPLVEFYEEIKKYEKLETEEERVARSREIFDSYIMKELLACSHPFSKSATEHVQGHLGKKQVPPDLFQPYIEEICQNLRGDVFQKFIESDKFTRFCQWKNVELNIHLTMNDFSVHRIIGRGGFGEVYGCRKRDTGKMYAMKCLDKKRIKMKQGETLALNERIMLSLVSTGDCPFIVCMSYAFHTPDKLSFILDLMNGGDLHYHLSQHGVFSEADMRFYAAEIILGLEHMHNRFVVYRDLKPANILLDEHGHVRISDLGLACDFSKKKPHASVGTHGYMAPEVLQKGVAYDSSADWFSLGCMLFKLLRGHSPFRQHKTKDKHEIDRMTLTMAVELPDSFSPELHSLLEGLLQRDVNRRLGCLGRGAQEVKESPFFRSLDWQMVFLQRYPPPLIPPRGEVNAADAFDIGSFDEEDTKGIKLLDSDQELYRNFPLTISERWQQEVAETVFDTINAETDRLEARKKAKNKQLGHEEDYALGKDCIMHGYMSKMGNPFLTQWQRRYFYLFPNRLEWRGEGEAPQSLLTMEEIQSVEETQIKERKCLLLKIRGGKQFILQCDSDPELVQWKKELRDAYREAQQLVQRVPKMKNKPRSPVVELSKVPLVQRGSANGL

SEQ ID NO: 131 - DNA, 1973 bp, Homo Sapiens
  CDS (130)...(1629)
tcccagggtcccgggttgggggggtggagcagcatttcgtcgccgcgggggtgccgggactccggccgcagtgtcgccgccatcacggacttcctgtgggacaagcgcacgggcctcgccgccagaacgatgccgcatcctcgaaggtaccactcctcagagcgaggcagccgggggagttaccgtgaacactatcggagccgaaagcataagcgacgaagaagtcgctcctggtcaagtagtagtgaccggacacgacggcgtcggcgagaggacagctaccatgtccgttctcgaagcagttatgatgatcgttcgtccgaccggagggtgtatgaccggcgatactgtggcagctacagacgcaacgattatagccgggatcggggagatgcctactatgacacagactatcggcattcctatgaatatcagcgggagaacagcagttaccgcagccagcgcagcagccggaggaagcacagacggcggaggaggcgcagccggacatttagccgctcatcttcgcagcacagcagccggagagccaagagtgtagaggacgacgctgagggccacctcatctaccacgtcggggactggctacaagagcgatatgaaatcgttagcaccttaggagaggggaccttcggccgagttgtacaatgtgttgaccatcgcaggggtggggctcgagttgccctgaagatcattaagaatgtggagaagtacaaggaagcagctcgacttgagatcaacgtgctagagaaaatcaatgagaaagaccctgacaacaagaacctctgtgtccagatgtttgactggtttgactaccatggccacatgtgtatctcctttgagcttctgggccttagcaccttcgatttcctcaaagacaacaactacctgccctaccccatccaccaagtgcgccacatggccttccagctgtgccaggctgtcaagttcctccatgataacaagctgacacatacagacctcaagcctgaaaatattctgtttgtgaattcagactatgagctcacctacaacctagagaagaagcgagatgagcgcagtgtgaagagcacagctgtgcgggtggtagactttggcagtgccacctttgaccatgagcaccatagcaccattgtctccactcgccattaccgagcaccagaagtcatccttgagttgggctggtcacagccttgtgatgtgtggagtataggctgcatcatctttgaatactatgtgggattcaccctcttccagacccatgacaacagagagcatctagccatgatggaaaggatcttgggtcctatcccttcccggatgatccgaaagacaagaaagcagaaatatttttaccggggtcgcctggattgggatgagaacacatcagctgggcgctatgttcgtgagaactgcaaaccgctgcggcggtatctgacctcagaggcagaggaacaccaccagctcttcgatctgattgaaagcatgctagagtatgaaccagctaagcggctgaccttgggtgaagcccttcagcatcctttcttcgcccgccttcgggctgagccgcccaacaagttgtgggactccagtcgggatatcagtcggtgacgatcaggccctgggcccccctgcatcttttatagcagtgggtgtccagtccaggacactggtgcttttttatacaagagaacgagccagagttcactccttcctcctggctctctatatacctgtgaatatgtgaaatagtgtaaatatgaaagaacttgtacctatcacttcaacccctgccttgtacataatactattccatccacacagtttccaccctcacctgccccctcatacggagttggatgggggccgagtgaggtaaccaggtggcatctaccccatgttttataaggaattttgtacagtctttgtgaaataaaataacgtgcttcatttga

SEQ ID NO: 132 - protein, 499 aa, Homo Sapiens
MPHPRRYHSSERGSRGSYREHYRSRKHKRRRSRSWSSSSDRTRRRRREDSYHVRSRSSYDDRSSDRRVYDRRYCGSYRRNDYSRDRGDAYYDTDYRHSYEYQRENSSYRSQRSSRRKHRRRRRRSRTFSRSSSQHSSRRAKSVEDDAEGHLIYHVGDWLQERYEIVSTLGEGTFGRVVQCVDHRRGGARVALKIIKNVEKYKEAARLEINVLEKINEKDPDNKNLCVQMFDWFDYHGHMCISFELLGLSTFDFLKDNNYLPYPIHQVRHMAFQLCQAVKFLHDNKLTHTDLKPENILFVNSDYELTYNLEKKRDERSVKSTAVRVVDFGSATFDHEHHSTIVSTRHYRAPEVILELGWSQPCDVWSIGCIIFEYYVGFTLFQTHDNREHLAMMERILGPIPSRMIRKTRKQKYFYRGRLDWDENTSAGRYVRENCKPLRRYLTSEAEEHHQLFDLIESMLEYEPAKRLTLGEALQHPFFARLRAEPPNKLWDSSRDISR

SEQ ID NO: 133 - DNA, 3293 bp, Homo Sapiens
  CDS (174)...(1817)
cgctccctcccctcctagctggcttcggcggggacggcggcggcggcggcggcggcggcggcgggcggggagggcgtgcgccggccgagaggtgtcggcggcgaggcaaaggaagtttcaagtggaaggtcgtccgtcggccggcgcgtcctcctgctctcctccgcagcatcatggcggagccgagcggctcgcccgtgcacgtccagcttccccagcaggcggccccggtgacagcggcggcggcggcggccccggcggccgcgacagcagcgccggccccggcagctcccgcggccccggccccggccccggccccggccccggcggcacaggctgtcggctggcccatctgcagggacgcgtacgagctgcaggaggttatcggcagtggagctactgctgtggttcaggcagccctatgcaaacccaggcaagaacgtgtagcaataaaacggatcaacttggaaaaatgccagaccagtatggatgaactattaaaagaaattcaagccatgagtcagtgcagccatcccaacgtagtgacctattacacctcttttgtggtcaaagatgaactttggctggtcatgaaattactaagtggaggttcaatgttggatatcataaaatacattgtcaaccgaggagaacacaagaatggagttctggaagaggcaataatagcaacaattcttaaagaggttttggaaggcttagactatctacacagaaacggtcagattcacagggatttgaaagctggtaatattcttctgggtgaggatggttcagtacaaatagcagattttggggtaagtgcgttcctagcaacagggggtgatgttacccgaaataaagtaagaaaaacattcgttggcaccccatgttggatggctcctgaagtcatggaacaggtgagaggctatgacttcaaggctgacatgtggagttttggaataactgccattgaattagcaacaggagcagcgccttatcacaaatatcctcccatgaaagtgttaatgttgactttgcaaaatgatccacccactttggaaacaggggtagaggataaagaaatgatgaaaaagtacggcaagtcctttagaaaattactttcactgtgtcttcagaaagatccttccaaaaggcccacagcagcagaacttttaaaatgcaaattcttccagaaagccaagaacagagagtacctgattgagaagctgcttacaagaacaccagacatagcccaaagagccaaaaaggtaagaagagttcctgggtcaagtggtcaccttcataaaaccgaagacggggactgggagtggagtgacgacgagatggatgagaagagcgaagaagggaaagcagctttttctcaggaaaagtcacgaagagtaaaagaagaaaatccagagattgcagtgagtgccagcaccatccccgaacaaatacagtccctctctgtgcacgactctcagggcccacccaatgctaatgaagactacagagaagcttcttcttgtgccgtgaacctcgttttgagattaagaaactccagaaaggaacttaatgacatacgatttgagtttactccaggaagagatacagcagatggtgtatctcaggagctcttctctgctggcttggtggatggtcacgatgtagttatagtggctgctaatttacagaagattgtagatgatcccaaagctttaaaaacattgacatttaagttggcttctggctgtgatgggtcggagattcctgatgaagtgaagctgattgggtttgctcagttgagtgtcagctgatgtatgtcccttgatgtcaccctgatctgtcatgccccaccgccacccctactcccttcaaccctccctctttctgcccatttcctcccaccccctcactcccatttcctagcaaaatcagaagattgtgaagaggccggcttcaacaaaatgggataaaaaaataattttttaaaacttacaacactccgagttctgctttattctctagcaatccacagtacaagaacaagcaaatgccacagctgcacgactgttgctcatttttccaaaagctatttaatattcttagcaatcaatttggatatcccttaagtgaaaagaatctgaaatacactcaggtggtcttatttattggcaacaaaaggaattttctatccagaagcctatttctcctttcattgttgttatttctgttataatactttaaattgtacatctgacaatactgcctcttttatgttgtatttagaaattaatatacttataaaattaagatttattagccaaacttgaattctagttttaaaactgactgtgaattttatttttcatatatttatgcattacacaccttagctataagaaaaaaagggttttgattatatgcttcttgcagttaatctcgttatttaaacaaaaagttttgggtctgtctttggagtatttgtaacttctaaattttgaaatgactgaattaggaatttggatgcttattcttttagtctgtttgcctaaaaaccaatttacaatctgactgtctcttgggagagggaggtgccttgcaaactttcacattaagaatgtgcctgaggctgctttactctggaatagtctcagatctaaaatttcctctatataaggtggcatatgttaagttttgcttcattggaccgtttagaatgctatgtaaaatgttgccattctgttagattgctaactatatacccatctctgatttggctctccttaagtgataggatttgttattctaaaggtgataaacttgaaaatatcagaatctgagttttacttgaaattttgcagaatacccaggtggagtgaaaattggaagggttttgtgcaatgactaaaaggtaaaacgctgttaaggttcaagaatcaatactttcaacccaagtagccccctgcttgactgtatattatggaactagtaaaccttaggattttgaaaattggagtctaatctttcaaggaggtgggctcccaggatggtaccattgctctttcctagctaaccctagatatggcagctctttaatgtacttcaaaaagcaaatatatattactaaggaaaaaaagttatttataattgccttgtcataattgttaaggtgttctagagccatttgcatacaatttaatgtaatttcattccattctattgtttacacaacgattactcgaagatgactgcaaaggtaaaaggaaaataaaagtgtattgcacaatgag

SEQ ID NO: 134 - protein, 547 aa, Homo Sapiens
MAEPSGSPVHVQLPQQAAPVTAAAAAAPAAATAAPAPAAPAAPAPAPAPAPAAQAVGWPICRDAYELQEVIGSGATAVVQAALCKPRQERVAIKRINLEKCQTSMDELLKEIQAMSQCSHPNVVTYYTSFVVKDELWLVMKLLSGGSMLDIIKYIVNRGEHKNGVLEEAIIATILKEVLEGLDYLHRNGQIHRDLKAGNILLGEDGSVQIADFGVSAFLATGGDVTRNKVRKTFVGTPCWMAPEVMEQVRGYDFKADMWSFGITAIELATGAAPYHKYPPMKVLMLTLQNDPPTLETGVEDKEMMKKYGKSFRKLLSLCLQKDPSKRPTAAELLKCKFFQKAKNREYLIEKLLTRTPDIAQRAKKVRRVPGSSGHLHKTEDGDWEWSDDEMDEKSEEGKAAFSQEKSRRVKEENPEIAVSASTIPEQIQSLSVHDSQGPPNANEDYREASSCAVNLVLRLRNSRKELNDIRFEFTPGRDTADGVSQELFSAGLVDGHDVVIVAANLQKIVDDPKALKTLTFKLASGCDGSEIPDEVKLIGFAQLSVS

SEQ ID NO: 135 - DNA, 5737 bp, Homo Sapiens
  CDS (284)...(5488)
taggcaggcggctgagccggcggcgggtggcctgcccaacgtgtgctgggtgggagaaggcgaggcggcagcgatgctgtctcttccgtgaggagcgcagaggaggtcgcggcgccggaggccccagaaggctcgaaggcgccgcgggctggggtcggtggcttagggagcccgtccggccatggtggccgcgggtggtggttggcgcggctgcgctgcggcccggggcagtgcggagccgggacagtcgcggcgctgacgcccgcgggccccagctgcagatatgaagcggagccgctgccgcgaccgaccgcagccgccgccgcccgaccgccgggaggatggagttcagcgggcagcggagctgtctcagtctttgccgccgcgccggcgagcgccgcccgggaggcagcggctggaggagcggacgggccccgcggggcccgagggcaaggagcaggatgtagtaactggagttagtcccctgctcttcaggaaactcagtaatcctgacatattttcatccactggaaaagttaaacttcagcgacaactgagtcaggatgattgtaagttatggagaggaaacctggccagctctctatcgggtaagcagctgctccctttgtccagcagtgtacatagcagtgtgggacaggtgacttggcagtcgtcaggagaagcatcaaacctggttcgaatgagaaaccagtcccttggacagtctgcaccttctcttactgctggcctgaaggagttgagccttccaagaagaggcagcttttgtcggacaagtaaccgcaagagcttgattgtgacctctagcacatcacctacactaccacggccacactcaccactccatggccacacaggtaacagtcctttggacagcccccggaatttctctccaaatgcacctgctcacttttcttttgttcctgcccgtaggactgatgggcggcgctggtctttggcctctttgccctcttcaggatatggaactaacactcctagctccactgtctcatcatcatgctcctcacaggaaaagctgcatcagttgcctttccagcctacagctgatgagctgcactttttgacgaagcatttcagcacagagagcgtaccagatgaggaaggacggcagtccccagccatgcggcctcgctcccggagcctcagtcccggacgatccccagtatcctttgacagtgaaataataatgatgaatcacgtttacaaagaaagattcccaaaggccaccgcacaaatggaagagcgactagcagagtttatttcctccaacactccagacagcgtgctgcccttggcagatggagccctgagctttattcatcatcaggtgattgagatggcccgagactgcctggataaatctcggagtggcctcattacatcacaatacttctacgaacttcaagagaatttggagaaacttttacaagatgctcatgagcgctcagagagctcagaagtggcttttgtgatgcagctggtgaaaaagctgatgattatcattgcccgcccagcacgtctcctggaatgcctggagtttgaccctgaagagttctaccaccttttagaagcagctgagggccacgccaaagagggacaagggattaaatgtgacattccccgctacatcgttagccagctgggcctcacccgggatcccctagaagaaatggcccagttgagcagctgtgacagtcctgacactccagagacagatgattctattgagggccatggggcatctctgccatctaaaaagacaccctctgaagaggacttcgagaccattaagctcatcagcaatggcgcctatggggctgtatttctggtgcggcacaagtccacccggcagcgctttgccatgaagaagatcaacaagcagaacctgatcctacggaaccagatccagcaggccttcgtggagcgtgacatactgactttcgctgagaacccctttgtggtcagcatgttctgctcctttgataccaagcgccacttgtgcatggtgatggagtacgttgaagggggagactgtgccactctgctgaagaatattggggccctgcctgtggacatggtgcgtctatactttgcggaaactgtgctggccctggagtacttacacaactatggcatcgtgcaccgtgacctcaagcctgacaacctcctaattacatccatggggcacatcaagctcacggactttggactgtccaaaatgggcctcatgagtctgacaacgaacttgtatgagggtcatattgaaaaggatgcccgggaattcctggacaagcaggtatgcgggaccccagaatacattgcgcctgaggtgatcctgcgccagggctatgggaagccagtggactggtgggccatgggcattatcctgtatgagttcctggtgggctgcgtccctttttttggagatactccggaggagctctttgggcaggtgatcagtgatgagattgtgtggcctgagggtgatgaggcactgcccccagacgcccaggacctcacctccaaactgctccaccagaaccctctggagagacttggcacaggcagtgcctatgaggtgaagcagcacccattctttactggtctggactggacaggacttctccgccagaaggctgaatttattcctcagttggagtcagaggatgatactagctattttgacacccgctcagagcgataccaccacatggactcggaggatgaggaagaagtgagtgaggatggctgccttgagatccgccagttctcttcctgctctccaaggttcaacaaggtgtacagcagcatggagcggctctcactgctcgaggagcgccggacaccacccccgaccaagcgcagcctgagtgaggagaaggaggaccattcagatggcctggcagggctcaaaggccgagaccggagctgggtgattggctcccctgagatattacggaagcggctgtcggtgtctgagtcgtcccacacagagagtgactcaagccctccaatgacagtgcgacgccgctgctcaggcctcctggatgcgcctcggttcccggagggccctgaggaggccagcagcaccctcaggaggcaaccacaggagggtatatgggtcctgacacccccatctggagagggggtatctgggcctgtcactgaacactcaggggagcagcggccaaagctggatgaggaagctgttggccggagcagtggttccagtccagctatggagacccgaggccgtgggacctcacagctggctgagggagccacagccaaggccatcagtgacctggctgtgcgtagggcccgccaccggctgctctctggggactcaacagagaagcgcactgctcgccctgtcaacaaagtgatcaagtccgcctcagccacagccctctcactcctcattccttcggaacaccacacctgctccccgttggccagccccatgtccccacattctcagtcgtccaacccatcatcccgggactcttctccaagcagggacttcttgccagcccttggcagcatgaggcctcccatcatcatccaccgagctggcaagaagtatggcttcaccctgcgggccattcgcgtctacatgggtgactccgatgtctacaccgtgcaccatatggtgtggcacgtggaggatggaggtccggccagtgaggcagggcttcgtcaaggtgacctcatcacccatgtcaatggggaacctgtgcatggcctggtgcacacggaggtggtggagctgatcctgaagagtggaaacaaggtggccatttcaacaactcccctggagaacacatccattaaagtggggccagctcggaagggcagctacaaggccaagatggcccgaaggagcaagaggagccgcggcaaggatgggcaagaaagcagaaaaaggagctccctgttccgcaagatcaccaagcaagcatccctgctccacaccagccgcagcctttcttcccttaaccgctccttgtcatcaggggagagtgggccaggctctcccacacacagccacagcctttccccccgatctcccactcaaggctaccgggtgacccccgatgctgtgcattcagtgggagggaattcatcacagagcagctcccccagctccagcgtgcccagttccccagccggctctgggcacacacggcccagctccctccacggtctggcacccaagctccaacgccagtaccgctctccacggcgcaagtcagcaggcagcatcccactgtcaccactggcccacaccccttctcccccacccccaacagcttcacctcagcggtccccatcgcccctgtctggccatgtagcccaggcctttcccacaaagcttcacttgtcacctcccctgggcaggcaactctcacggcccaagagtgcggagccaccccgttcaccactactcaagagggtgcagtcggctgagaaactggcagcagcacttgccgcctctgagaagaagctagccacttctcgcaagcacagccttgacctgccccactctgaactaaagaaggaactgccgcccagggaagtgagccctctggaggtagttggagccaggagtgtgctgtctggcaagggggccctgccagggaagggggtgctgcagcctgctccctcacgggccctaggcaccctccggcaggaccgagccgaacgacgggagtcgctgcagaagcaagaagccattcgtgaggtggactcctcagaggacgacaccgaggaagggcctgagaacagccagggtgcacaggagctgagcttggcacctcacccagaagtgagccagagtgtggcccctaaaggagcaggagagagtggggaagaggatcctttcccgtccagaggccctaggagcctgggcccaatggtcccaagcctattgacagggatcacactggggcctcccagaatggaaagtcccagtggtccccacaggaggctcgggagcccacaagccattgaggaggctgccagctcctcctcagcaggccccaacctaggtcagtctggagccacagaccccatccctcctgaaggttgctggaaggcccagcacctccacacccaggcactaacagcactttctcccagcacttcgggactcacccccaccagcagttgctctcctcccagctccacctctgggaagctgagcatgtggtcctggaaatcccttattgagggcccagacagggcatccccaagcagaaaggcaaccatggcaggtgggctagccaacctccaggatttggaaacacaactccagcccagcctaagaacctgtctcccagggagcaggggaagacacagccacctagtgcccccagactggcccatccatcttatgaggatcccagccagggctggctatgggagtctgagtgtgcacaagcagtgaaagaggatccagccctgagcatcacccaagtgcctgatgcctcaggtgacagaaggcaggacgttccatgccgaggctgccccctcacccagaagtctgagcccagcctcaggaggggccaagaaccagggggccatcaaaagcatcgggatttggcattggttccagatgagcttttaaagcaaacatagcagttgtttgccatttcttgcactcagacctgtgtaatatatgctcctggaaaccatc

SEQ ID NO: 136 - protein, 1734 aa, Homo Sapiens
MKRSRCRDRPQPPPPDRREDGVQRAAELSQSLPPRRRAPPGRQRLEERTGPAGPEGKEQDVVTGVSPLLFRKLSNPDIFSSTGKVKLQRQLSQDDCKLWRGNLASSLSGKQLLPLSSSVHSSVGQVTWQSSGEASNLVRMRNQSLGQSAPSLTAGLKELSLPRRGSFCRTSNRKSLIVTSSTSPTLPRPHSPLHGHTGNSPLDSPRNFSPNAPAHFSFVPARRTDGRRWSLASLPSSGYGTNTPSSTVSSSCSSQEKLHQLPFQPTADELHFLTKHFSTESVPDEEGRQSPAMRPRSRSLSPGRSPVSFDSEIIMMNHVYKERFPKATAQMEERLAEFISSNTPDSVLPLADGALSFIHHQVIEMARDCLDKSRSGLITSQYFYELQENLEKLLQDAHERSESSEVAFVMQLVKKLMIIIARPARLLECLEFDPEEFYHLLEAAEGHAKEGQGIKCDIPRYIVSQLGLTRDPLEEMAQLSSCDSPDTPETDDSIEGHGASLPSKKTPSEEDFETIKLISNGAYGAVFLVRHKSTRQRFAMKKINKQNLILRNQIQQAFVERDILTFAENPFVVSMFCSFDTKRHLCMVMEYVEGGDCATLLKNIGALPVDMVRLYFAETVLALEYLHNYGIVHRDLKPDNLLITSMGHIKLTDFGLSKMGLMSLTTNLYEGHIEKDAREFLDKQVCGTPEYIAPEVILRQGYGKPVDWWAMGIILYEFLVGCVPFFGDTPEELFGQVISDEIVWPEGDEALPPDAQDLTSKLLHQNPLERLGTGSAYEVKQHPFFTGLDWTGLLRQKAEFIPQLESEDDTSYFDTRSERYHHMDSEDEEEVSEDGCLEIRQFSSCSPRFNKVYSSMERLSLLEERRTPPPTKRSLSEEKEDHSDGLAGLKGRDRSWVIGSPEILRKRLSVSESSHTESDSSPPMTVRRRCSGLLDAPRFPEGPEEASSTLRRQPQEGIWVLTPPSGEGVSGPVTEHSGEQRPKLDEEAVGRSSGSSPAMETRGRGTSQLAEGATAKAISDLAVRRARHRLLSGDSTEKRTARPVNKVIKSASATALSLLIPSEHHTCSPLASPMSPHSQSSNPSSRDSSPSRDFLPALGSMRPPIIIHRAGKKYGFTLRAIRVYMGDSDVYTVHHMVWHVEDGGPASEAGLRQGDLITHVNGEPVHGLVHTEVVELILKSGNKVAISTTPLENTSIKVGPARKGSYKAKMARRSKRSRGKDGQESRKRSSLFRKITKQASLLHTSRSLSSLNRSLSSGESGPGSPTHSHSLSPRSPTQGYRVTPDAVHSVGGNSSQSSSPSSSVPSSPAGSGHTRPSSLHGLAPKLQRQYRSPRRKSAGSIPLSPLAHTPSPPPPTASPQRSPSPLSGHVAQAFPTKLHLSPPLGRQLSRPKSAEPPRSPLLKRVQSAEKLAAALAASEKKLATSRKHSLDLPHSELKKELPPREVSPLEVVGARSVLSGKGALPGKGVLQPAPSRALGTLRQDRAERRESLQKQEAIREVDSSEDDTEEGPENSQGAQELSLAPHPEVSQSVAPKGAGESGEEDPFPSRGPRSLGPMVPSLLTGITLGPPRMESPSGPHRRLGSPQAIEEAASSSSAGPNLGQSGATDPIPPEGCWKAQHLHTQALTALSPSTSGLTPTSSCSPPSSTSGKLSMWSWKSLIEGPDRASPSRKATMAGGLANLQDLETQLQPSLRTCLPGSRGRHSHLVPPDWPIHLMRIPARAGYGSLSVHKQ

SEQ ID NO: 137 - DNA, 2083 bp, Homo Sapiens
  CDS (297)...(1613)
agcgttcgctcaactccagaaccttccgacctccgctagttcctgcgggcctttgcccgcttcccggtgcaccctccccgggagacacctcagacccccgacagcctgggcaggctcggtgcctgcgggtgcgttcctgatcacccctcccctcttccctccccctcatcctccattcccttgttttcaccctctgtcctctgcccgtcactccccttgtcacctcttggagccccctcctaaccagcggccagtgggtttcccataccccaggatgtgagcctctttaacctgtaatgctgtggctagcccttggcccctttcctgccatggagaaccaggtgctggtaattcgcatcaagatcccaaatagtggcgcggtggactggacagtgcactccgggccgcagttactcttcagggatgtgctggatgtgataggccaggttctgcctgaagcaacaactacagcatttgaatatgaagatgaagatggtgatcgaattacagtgagaagtgatgaggaaatgaaggcaatgctgtcatattattattccacagtaatggaacagcaagtaaatggacagttaatagagcctctgcagatatttccaagagcctgcaagcctcctggggaacggaacatacatggcctgaaggtgaatactcgggccggaccctctcaacacagcagcccagcagtctcagattcacttccaagcaatagcttaaagaagtcttctgctgaactgaaaaaaatactagccaatggccagatgaatgaacaagacatacgatatcgggacactcttggtcatggcaacggaggcacagtctacaaagcatatcatgtcccgagtgggaaaatattagctgtaaaggtcatactactagatattacactggaacttcagaagcaaattatgtctgaattggaaattctttataagtgcgattcatcatatatcattggattttatggagcattttttgtagaaaacaggatttcaatatgtacagaattcatggatgggggatctttggatgtatataggaaaatgccagaacatgtccttggaagaattgcagtagcagttgttaaaggccttacttatttgtggagtttaaagattttacatagagacgtgaagccctccaatatgctagtaaacacaagaggacaggttaagctgtgtgattttggagttagcactcagctggtgaattctatagccaagacgtatgttggaacaaatgcttatatggcgcctgaaaggatttcaggggagcagtatggaattcattctgatgtctggagcttaggaatctcttttatggagattcagaaaaaccagggatctttaatgcctctccagcttctgcagtgcattgttgatgaggattcgcccgtccttccagttggagagttctcggagccatttgtacatttcatcactcagtgtatgcgaaaacagccaaaagaaaggccagcacctgaagaattgatgggccacccgttcatcgtgcagttcaatgatggaaatgccgccgtggtgtccatgtgggtgtgccgggcgctggaggagaggcggagccagcaggggcccccgtgaggctgccgcagggcactgaaagcccaggaccagtaaccaaggagaacaacccacccgtcgcccttctccgtatgctgcctgcgccagaagagctttgctgggccctggcttccctgccctcgccttcacctctgtcagcaggtggccttgcctggggagccccatgtgtggcccaccccaccaggccatccccataccttctggtttgaaggcgctgacactggcagagaggtaaagggtggggcattgagaatggaggctcccagggtccctgcccacttctgttttcctaatgtttttctctataaagggtcaggcccgtcagcatcactgatgggaataaaagtattaatgctttgtgacagcctctgcctgaaaactggacagaaggacccagaggtgttctttcattttctctcttacctccaatctttcccctttcaagctacaggtaaaggctctaccaccat

SEQ ID NO: 138 - protein, 438 aa, Homo Sapiens
MLWLALGPFPAMENQVLVIRIKIPNSGAVDWTVHSGPQLLFRDVLDVIGQVLPEATTTAFEYEDEDGDRITVRSDEEMKAMLSYYYSTVMEQQVNGQLIEPLQIFPRACKPPGERNIHGLKVNTRAGPSQHSSPAVSDSLPSNSLKKSSAELKKILANGQMNEQDIRYRDTLGHGNGGTVYKAYHVPSGKILAVKVILLDITLELQKQIMSELEILYKCDSSYIIGFYGAFFVENRISICTEFMDGGSLDVYRKMPEHVLGRIAVAVVKGLTYLWSLKILHRDVKPSNMLVNTRGQVKLCDFGVSTQLVNSIAKTYVGTNAYMAPERISGEQYGIHSDVWSLGISFMEIQKNQGSLMPLQLLQCIVDEDSPVLPVGEFSEPFVHFITQCMRKQPKERPAPEELMGHPFIVQFNDGNAAVVSMWVCRALEERRSQQGPP

SEQ ID NO: 139 - DNA, 2380 bp, Homo Sapiens
  CDS (7)...(1863)
gccaccatggccccgcccccaccgccactggctgccagcaccccgctcctccatggcgagtttggctcctacccagcccgaggcccacgctttgccctcacccttacatcgcaggccctgcacatacagcggctgcgccccaaacctgaagccaggccccggggtggcctggtcccgttggccgaggtctcaggctgctgcaccctgcgaagccgcagcccctcagactcagcggcctacttctgcatctacacctaccctcggggccggcgcggggcccggcgcagagccactcgcaccttccgggcagatggggccgccacctacgaagagaaccgtgccgaggcccagcgctgggccactgccctcacctgtctgctccgaggactgccactgcccggggatggggagatcacccctgacctgctacctcggccgccccggttgcttctattggtcaatccctttgggggtcggggcctggcctggcagtggtgtaagaaccacgtgcttcccatgatctctgaagctgggctgtccttcaacctcatccagacagaacgacagaaccacgcccgggagctggtccaggggctgagcctgagtgagtgggatggcatcgtcacggtctcgggagacgggctgctccatgaggtgctgaacgggctcctagatcgccctgactgggaggaagctgtgaagatgcctgtgggcatcctcccctgcggctcgggcaacgcgctggccggagcagtgaaccagcacgggggatttgagccagccctgggcctcgacctgttgctcaactgctcactgttgctgtgccggggtggtggccacccactggacctgctctccgtgacgctggcctcgggctcccgctgtttctccttcctgtctgtggcctggggcttcgtgtcagatgtggatatccagagcgagcgcttcagggccttgggcagtgcccgcttcacactgggcacggtgctgggcctcgccacactgcacacctaccgcggacgcctctcctacctccccgccactgtggaacctgcctcgcccacccctgcccatagcctgcctcgtgccaagtcggagctgaccctaaccccagacccagccccgcccatggcccactcacccctgcatcgttctgtgtctgacctgcctcttcccctgccccagcctgccctggcctctcctggctcgccagaacccctgcccatcctgtccctcaacggtgggggcccagagctggctggggactggggtggggctggggatgctccgctgtccccggacccactgctgtcttcacctcctggctctcccaaggcagctctacactcacccgtctccgaaggggcccccgtaattcccccatcctctgggctcccacttcccacccctgatgcccgggtaggggcctccacctgcggcccgcccgaccacctgctgcctccgctgggcaccccgctgcccccagactgggtgacgctggagggggactttgtgctcatgttggccatctcgcccagccacctaggcgctgacctggtggcagctccgcatgcgcgcttcgacgacggcctggtgcacctgtgctgggtgcgtagcggcatctcgcgggctgcgctgctgcgccttttcttggccatggagcgtggtagccacttcagcctgggctgtccgcagctgggctacgccgcggcccgtgccttccgcctagagccgctcacaccacgcggcgtgctcacagtggacggggagcaggtggagtatgggccgctacaggcacagatgcaccctggcatcggtacactgctcactgggcctcctggctgcccggggcgggagccctgaaactaaacaagcttggtacccgccgggggcggggcctacattccaatggggcggagcttgagctagggggtgtggcctggctgctagagttgtggtggcaggggccctggccccgtctcaggattgcgctcgctttcatgggaccagacgtgatgctggaaggtgggcgtcgtcacggttaaagagaaatgggctcgtcccgagggtagtgcctgatcaatgagggcggggcctggcgtctgatctggggccgcccttacggggcagggctcagtcctgacgcttgccacctgctcctacccggccaggatggctgagggcggagtctattttacgcgtcgcccaatgacaggacctggaatgtactggctggggtaggcctcagtgagtcggccggtcagggcccgcagcctcgccccatccactccggtgcctccatttagctggccaatcagcccaggaggggcaggttccccggggccggcgctaggatttgcactaatgttcctctccccgc

SEQ ID NO: 140 - protein, 618 aa, Homo Sapiens
MAPPPPPLAASTPLLHGEFGSYPARGPRFALTLTSQALHIQRLRPKPEARPRGGLVPLAEVSGCCTLRSRSPSDSAAYFCIYTYPRGRRGARRRATRTFRADGAATYEENRAEAQRWATALTCLLRGLPLPGDGEITPDLLPRPPRLLLLVNPFGGRGLAWQWCKNHVLPMISEAGLSFNLIQTERQNHARELVQGLSLSEWDGIVTVSGDGLLHEVLNGLLDRPDWEEAVKMPVGILPCGSGNALAGAVNQHGGFEPALGLDLLLNCSLLLCRGGGHPLDLLSVTLASGSRCFSFLSVAWGFVSDVDIQSERFRALGSARFTLGTVLGLATLHTYRGRLSYLPATVEPASPTPAHSLPRAKSELTLTPDPAPPMAHSPLHRSVSDLPLPLPQPALASPGSPEPLPILSLNGGGPELAGDWGGAGDAPLSPDPLLSSPPGSPKAALHSPVSEGAPVIPPSSGLPLPTPDARVGASTCGPPDHLLPPLGTPLPPDWVTLEGDFVLMLAISPSHLGADLVAAPHARFDDGLVHLCWVRSGISRAALLRLFLAMERGSHFSLGCPQLGYAAARAFRLEPLTPRGVLTVDGEQVEYGPLQAQMHPGIGTLLTGPPGCPGREP

SEQ ID NO: 141 - DNA, 1954 bp, Homo Sapiens
  CDS (227)...(1486)
cgcatgcgcaggcgacagctcatggcgttcagggcctgacggttgctagggtgacagggacacaacatggcggcgggatctctaacgctctccttcgagggaccaccacggagatcctagtgcgggaccccgcctcagggaagtggaaagcagggggacaaccttcctgcttccttcttttccgtccagtgtcggcaaggggttgtcaccggcttccgcatccaagatgaagaactataaagcaattggcaaaataggagagggaacgttttctgaagttatgaagatgcaaagcctgagagatggaaactactatgcatgtaaacaaatgaagcagcgctttgaaagtattgagcaagtcaacaacctacgagagatccaagcactgaggcgcctgaatccgcacccaaacattcttatgttgcatgaagtggtttttgacagaaaatctggttctcttgcactaatatgtgaacttatggacatgaatatttatgagctaatacgagggagaagatacccattatcagaaaaaaaaattatgcactatatgtaccagttatgtaagtccctggatcatattcacagaaatggaatatttcacagagatgtaaaaccagaaaatatactaataaagcaggatgtcctgaaattaggggactttggctcctgccggagtgtctattccaagcagccgtacacggaatacatctccacccgctggtaccgggccccggagtgtctcctcactgatgggttctacacgtacaagatggacctgtggagcgccggctgtgtgttctacgagatcgccagtctgcagcccctctttcctggagtaaatgaactggaccaaatctcaaaaatccacgatgtcatcggcacacccgctcagaagatcctcaccaagttcaaacagtcgagagctatgaattttgattttccttttaaaaagggatcaggaatacctctactaacaaccaatttgtccccacaatgcctctccctcctgcacgcaatggtggcctatgatcccgatgagagaatcgccgcccaccaggccctgcagcacccctacttccaagaacagaggaaaacagagaagcgggctctgggcagccacagaaaagctggctttccggagcaccctgtggcaccggaaccactcagtaacagctgccagatttccaaggagggcagaaagcagaaacagtccctaaagcaagaggaggaccgtcccaagagacgaggaccggcctatgtcatggaactgcccaaactaaagctttcgggagtggtcagactgtcgtcttactccagccccacgctgcagtccgtgcttggatctggaacaaatggaagagtgccggtgctgagacccttgaagtgcatccctgcgagcaagaagacagatccgcagaaggaccttaagcctgccccgcagcagtgtcgcctgcccaccatagtgcggaaaggcggaagataactgagcagcaccgtcgtctcgacttcggaggcaacaccaagcccgaccgggccaggcctgggtgatctgctgctgagacgccacggagggctggggatgcgcctgcgtccgtttcgcgctggccggggctctgggtgctgccctgcgccctgccgcacccgcggcccgcgcagctgcctaggatgttctgggctaatatacttgtaaaaccaccgcattctagggttttctttcattttcgttaagaatttggggcaggaaatactttgtaactttgtatatgaatcaaaacaaacgagcaggcatttctgtgatgtgttgggcgtggttggaaggtgggttctgcgtgtcccttcccagcgctgctggtcagtcgtggagcgccatcatgtcttaccagtgacgctgctgacacccctgacttttattaaagaataagctgtcgttaaaaaaaaaaaaaaaaaaaaa

SEQ ID NO: 142 - protein, 419 aa, Homo Sapiens
MKNYKAIGKIGEGTFSEVMKMQSLRDGNYYACKQMKQRFESIEQVNNLREIQALRRLNPHPNILMLHEVVFDRKSGSLALICELMDMNIYELIRGRRYPLSEKKIMHYMYQLCKSLDHIHRNGIFHRDVKPENILIKQDVLKLGDFGSCRSVYSKQPYTEYISTRWYRAPECLLTDGFYTYKMDLWSAGCVFYEIASLQPLFPGVNELDQISKIHDVIGTPAQKILTKFKQSRAMNFDFPFKKGSGIPLLTTNLSPQCLSLLHAMVAYDPDERIAAHQALQHPYFQEQRKTEKRALGSHRKAGFPEHPVAPEPLSNSCQISKEGRKQKQSLKQEEDRPKRRGPAYVMELPKLKLSGVVRLSSYSSPTLQSVLGSGTNGRVPVLRPLKCIPASKKTDPQKDLKPAPQQCRLPTIVRKGGR

SEQ ID NO: 143 - DNA, 3032 bp, Homo Sapiens
  CDS (296)...(2992)
tttaaatacataagtttaaaagagaattaactttcaatttgcaaattaaaatgagaatggttgccttttcttcattatcaagagatggtgagttgtcctcctgttgcatcataaatacaaaggactgaagttataaaagagaaaagagaagtttgctgctaaaatgaatctgagcaatatggaatattttgtgccacacacaaaaaggtactgaagatttaccccccaaaaaaaattgtcaatgagaaataaagctaactgatatcaaaaagcagagcctgctctactggccatcatgcgtaaaggggtgctgaaggacccagagattgccgatctattctacaaagatgatcctgaggaactttttattggtttgcatgaaattggacatggaagttttggagcagtttattttgctacaaatgctcacaccagtgaggtggtggcaattaagaagatgtcctatagtgggaagcagacccatgagaaatggcaagatattcttaaggaagttaaatttttacgacaattgaagcatcctaatactattgagtacaaaggctgttacttgaaagaacacactgcttggttggtgatggaatattgcttaggctcagcctctgatttattagaagttcataaaaaaccacttcaggaagtggagatcgctgccattactcatggagccttgcatggactagcctacctacattctcatgcattgattcatagggatattaaagcaggaaatattcttctaacagagccaggtcaggtaaaactagctgattttggatctgcttcaatggcttctcctgccaactccttcgtgggcacaccttactggatggctccagaggtgatcttagctatggatgaaggacagtatgatgggaaagttgatatttggtcacttggcatcacttgtattgaattggcggaacggaagccgccccttttcaacatgaatgcaatgagtgccttatatcacattgcccagaatgactccccaacgttacagtctaatgaatggacagactcctttaggagatttgttgattactgcttgcagaaaatacctcaggaaaggccaacatcagcagaactattaaggcatgactttgttcgacgagaccggccactacgtgtcctcattgacctcatacagaggacaaaagatgcagttcgtgagctagataacctacagtaccgaaaaatgaaaaaaatacttttccaagagacacggaatggacccttgaatgagtcacaggaggatgaggaagacagtgaacatggaaccagcctgaacagggaaatggacagcctgggcagcaaccattccattccaagcatgtccgtgagcacaggcagccagagcagcagtgtgaacagcatgcaggaagtcatggacgagagcagttccgaacttgtcatgatgcacgatgacgaaagcacaatcaattccagctcctccgtcgtgcataagaaagatcatgtattcataagggatgaggcgggccacggcgatcccaggcctgagccgcggcctacccagtcagttcagagccaggccctccactaccggaacagagagcgctttgccacgatcaaatcagcatctttggttacacgacagatccatgagcatgagcaggagaacgagttgcgggaacagatgtcaggttataagcggatgcggcgccagcaccagaagcagctgatcgccctggagaacaagctgaaggctgagatggacgagcaccgcctcaagctacagaaggaggtggagacgcatgccaacaactcgtccatcgagctggagaagctggccaagaagcaagtggctatcatagaaaaggaggcaaaggtagctgcagcagatgagaagaagttccagcaacagatcttggcccagcagaagaaagatttgacaactttcttagaaagtcagaagaagcagtataagatttgtaaggaaaaaataaaagaggaaatgaatgaggaccatagcacacccaagaaagagaagcaagagcggatctccaaacataaagagaacttgcagcacacacaggctgaagaggaagcccaccttctcactcaacagagactgtactacgacaaaaattgtcgtttcttcaagcggaaaataatgatcaagcggcacgaggtggagcagcagaacattcgggaggaactaaataaaaagaggacccagaaggagatggagcatgccatgctaatccggcacgacgagtccacccgagagctagagtacaggcagctgcacacgttacagaagctacgcatggatctgatccgtttacagcaccagacggaactggaaaaccagctggagtacaataagaggcgagaaagagaactgcacagaaagcatgtcatggaacttcggcaacagccaaaaaacttaaaggccatggaaatgcaaattaaaaaacagtttcaggacacttgcaaagtacagaccaaacagtataaagcactcaagaatcaccagttggaagttactccaaagaatgagcacaaaacaatcttaaagacactgaaagatgagcagacaagaaaacttgccattttggcagagcagtatgaacagagtataaatgaaatgatggcctctcaagcgttacggctagatgaggctcaagaagcagaatgccaggccttgaggctacagctccagcaggaaatggagctgctcaacgcctaccagagcaaaatcaagatgcaaacagaggcacaacatgaacgtgagctccagaagctagagcagagagtgtctctgcgcagagcacaccttgagcagaagattgaagaggagctggctgcccttcagaaggaacgcagcgagagaataaagaacctattggaaaggcaagagcgagagattgaaacttttgacatggagagcctcagaatgggatttgggaatttggttacattagattttcctaaggaggactacagatgagattaaattttttgccatttacaaaaaaaaaaaaaaaaaa

SEQ ID NO: 144 - protein, 898 aa, Homo Sapiens
MRKGVLKDPEIADLFYKDDPEELFIGLHEIGHGSFGAVYFATNAHTSEVVAIKKMSYSGKQTHEKWQDILKEVKFLRQLKHPNTIEYKGCYLKEHTAWLVMEYCLGSASDLLEVHKKPLQEVEIAAITHGALHGLAYLHSHALIHRDIKAGNILLTEPGQVKLADFGSASMASPANSFVGTPYWMAPEVILAMDEGQYDGKVDIWSLGITCIELAERKPPLFNMNAMSALYHIAQNDSPTLQSNEWTDSFRRFVDYCLQKIPQERPTSAELLRHDFVRRDRPLRVLIDLIQRTKDAVRELDNLQYRKMKKILFQETRNGPLNESQEDEEDSEHGTSLNREMDSLGSNHSIPSMSVSTGSQSSSVNSMQEVMDESSSELVMMHDDESTINSSSSVVHKKDHVFIRDEAGHGDPRPEPRPTQSVQSQALHYRNRERFATIKSASLVTRQIHEHEQENELREQMSGYKRMRRQHQKQLIALENKLKAEMDEHRLKLQKEVETHANNSSIELEKLAKKQVAIIEKEAKVAAADEKKFQQQILAQQKKDLTTFLESQKKQYKICKEKIKEEMNEDHSTPKKEKQERISKHKENLQHTQAEEEAHLLTQQRLYYDKNCRFFKRKIMIKRHEVEQQNIREELNKKRTQKEMEHAMLIRHDESTRELEYRQLHTLQKLRMDLIRLQHQTELENQLEYNKRRERELHRKHVMELRQQPKNLKAMEMQIKKQFQDTCKVQTKQYKALKNHQLEVTPKNEHKTILKTLKDEQTRKLAILAEQYEQSINEMMASQALRLDEAQEAECQALRLQLQQEMELLNAYQSKIKMQTEAQHERELQKLEQRVSLRRAHLEQKIEEELAALQKERSERIKNLLERQEREIETFDMESLRMGFGNLVTLDFPKEDYR
